(19) United States
(12) Patent Application Publication
(10) Pub. No.: US 2021/0315984 A1
(43) Pub. Date: Oct. 14, 2021

(54) COMPOSITIONS COMPRISING HERPES SIMPLEX VIRUS-I FOR USE IN METHODS OF TREATING AND PREVENTING CANCER

(71) Applicants: Konstantin G. Kousoulas, Baton Rouge, LA (US); Vladimir N. Chouljenko, Saint Gabriel, LA (US); James Michael Mathis, Geismer, LA (US)

(72) Inventors: Konstantin G. Kousoulas, Baton Rouge, LA (US); Vladimir N. Chouljenko, Saint Gabriel, LA (US); James Michael Mathis, Geismer, LA (US)

(21) Appl. No.: 17/264,420

(22) PCT Filed: Aug. 1, 2019
(86) PCT No.: PCT/US2019/044749

§ 371 Date: Jan. 29, 2021

Related U.S. Application Data
(60) Provisional application No. 62/713,183, filed on Aug. 1, 2018.
(60) Provisional application No. 62/713,269, filed on Aug. 1, 2018.

(51) Int. Cl. A61K 39/00; C12N 7/00

(52) U.S. Cl. CPC A61K 39/0011; C12N 7/00; A61K 51/00; C12N 2710/16651; A61K 2039/585; C12N 2710/16634

(57) ABSTRACT

The present invention provides compositions for treating or preventing cancer and methods of using and making the compositions. The compositions comprise herpes simplex viruses comprising recombinant herpes simplex virus genomes. Further provided are recombinant herpes simplex virus genomes, viruses comprising the recombinant herpes simplex virus genomes, and cancer vaccines and other compositions comprising the viruses.

### CROSS-REFERENCE TO RELATED APPLICATIONS

[0001] This application claims the benefit of U.S. Provisional Application Nos. 62/713,183 and 62/713,269, both filed Aug. 1, 2018; both of which are hereby incorporated herein in their entirety by reference.

### REFERENCE TO A SEQUENCE LISTING SUBMITTED AS A TEXT FILE

[0002] The official copy of the sequence listing is submitted electronically via EFS-Web as an ASCII formatted sequence listing with a file named 070114-0016SEQLST.TXT, created on Jul. 31, 2019, and having a size of 609 kilobytes, and is filed concurrently with the specification. The sequence listing contained in this ASCII formatted document is part of the specification and is herein incorporated by reference in its entirety.

### FIELD OF THE INVENTION

[0003] The present invention relates to the field of oncology, particularly to compositions and methods for treating or preventing cancer.

### BACKGROUND OF THE INVENTION

[0004] Viruses that preferentially lyse cancer cells are described as being “oncolytic” or tumor-lysing. Oncolytic virotherapy works by directly killing tumor cells and stimulating an immune response. Viruses used for this method fall into three major categories: wild type animal viruses that do not normally infect human cells but are cytotoxic to human cancer cells, attenuated mutants of human viruses in which genes important for virus replication that are not needed for growth in cancer cells have been mutated or deleted, and viruses that have been attenuated by serial passage in culture like most live virus vaccines. The idea to use viruses as cancer therapy originated in the early 1900's when it was observed that occasionally viral infections would result in remission in some cancer patients (Dock (1904) Am. J. Med. Sci. 127(4):563). Many different live viruses have been tested as potential therapy for cancer in the last century, beginning as early as 1910, when a live-attenuated Rabies vaccine was observed to result in regression of cervical cancer in a patient (Sinkovics & Horvath (2008) Arch. Immunol. Ther. Exp. 56 Suppl 1:3s-59s). Other viruses known to infect humans including Epstein-Barre, adenovirus, and hepatitis virus were investigated with variable results in efficacy in the mid-1900's (Hoster et al. (1949) Cancer Res. 9:473-480; Taylor (1953) Br. Med. J. 1:589-593; Huebner et al. (1956) Cancer 9:1211-1218). Studies on the use of viruses in the treatment of carcinoma of the cervix (Hoster et al. (1949) Cancer Res. 9:473-480; Taylor (1953) Br. Med. J. 1:589-593; Huebner et al. (1956) Cancer 9:1211-1218). Safety concerns regarding using live viruses in cancer patients markedly limited the field of oncolytic virotherapy until the development of molecular tools enabling genetic engineering in the 1990's (Kelly & Russell (2007) Mol. Ther. 15:651-659). The field has now expanded to include many different viruses and has become increasingly sophisticated as molecular tools to create purposeful viral genetic mutations that enhance cancer-killing abilities and safety have become more widely available.

[0005] Some viruses have a natural lytic phase in their life cycle and have a natural affinity for rapidly dividing cells (e.g. herpes simplex virus type-1 and parvoviruses). The affinity for rapidly dividing cells can be enhanced through careful, selective genetic engineering; further, cellular tropism can be similarly altered to retarget viral infections to limit them to transformed cells, thereby sparing normal tissues. Nonessential genes associated with virulence can also be deleted for enhanced safety while maintaining the ability to replicate.

[0006] In addition to direct lysis, oncolytic viruses may also cause cell death indirectly through immunogenic cell death (ICD) where ER stress results in expression of danger associated molecular patterns (DAMPs) as has been shown with adenoviruses (Diaconu et al. (2012) Cancer Res. 72:2327-2338), coxsackie B3 virus (Miyamoto et al. (2012) Cancer Res. 72:2609-2621.), and measles (Donnelly et al. (2013) Gene Ther. 20:7-15.). Adaptive immune responses have been demonstrated for reoviruses (Prestwich et al. (2008) Clin. Cancer Res. 14:7358-7366.), herpes simplex virus (HSV) (Toda et al. (1998) J. Immunol. 160:4457-4464; Toda et al. (1999) Hum. Gene Ther. 10:385-393), and vaccinia (Thorne & Contag (2008) Gene Ther. 15:753-758). Selective destruction of tumor-supporting components of the tumor microenvironment including tumor-associated vasculature has been shown for vesicular stomatitis virus (VSV), vaccinia virus, and herpes simplex virus type 1 (HSV-1), which can all infect endothelial cells (Breitbach et al. (2013) Cancer Res. 73:1265-1275; Breitbach et al. (2011)Mol. Ther. 19:886-894; Benencia et al. (2005) Hum. Gene Ther. 16:765-778.). Some viruses may inhibit tumor growth due to direct disruption of tumor-associated vasculature through infection of endothelial cells in this mechanism. In some instances, infection of endothelial cells by certain viruses is dependent on expression of high levels of VEGF and FGF which are often present in the tumor microenvironments.

[0007] The ability of replication competent viruses to act as a self-sustaining intralesional therapeutic is an advantage. Systemic administration of cancer therapeutics can result in significant toxicity and local administration of many therapeutics may be quickly cleared. While intralesional oncolytic virotherapy is practical for easy-to-access tumors like melanoma or squamous cell carcinoma, administration for internal or widely disseminated cancers has been less practical, largely due to the fact that safe and efficacious systemic viral delivery presents inherent challenges. One is that intravenous delivery poses the risk of systemic infection and complications. Retargeting the virus via genetic manipulation could be one solution; however, as mentioned, efficacy would be expected to be limited in a strict target-dependent strategy due to heterogeneity of expression of targets within and between patients. Further, high doses may be necessary in order to achieve an efficacious systemic dose since a percentage of injected virus is likely to be sequestered in the liver after intravenous injection and since patients may already have, or may develop during therapy, circulating neutralizing antibodies in the serum which may result in rapid elimination of virus before it can reach the tumor (Fountzilas et al. (2017) Oncotarget 8:102617-102639; Alemany et al. (2000) J. Gen. Virol. 81:2605-2609; Dubin et al. (1992) Curr. Top. Microbiol. Immunol. 179:111-120). In general, it is thought that the majority of virus injected intravenously is cleared within about 2 minutes (Willmon et al. (2009) Mol. Ther. 17:1667-1676). It is estimated that 50-80% of humans possess neutralizing antibodies to HSV (Fountzilas et al. (2017) Oncotarget 8:102617-102639; Fields et al. (1996) “Fields Virology,” 3rd ed, Lippincott-Raven Publishers, Philadelphia). Efforts to reduce elimination of oncolytic viruses after systemic delivery have included pretreatment with cyclophosphamide/cobra venom to exhaust complement and IgM in mouse models (Sanchala et al. (2017) Front. Pharmacol. 8:270; Ikeda et al. (1999) Nat. Med. 5:881-887; Ikeda et al. (2000) J. Virol. 74:4765-4775; Wakimoto et al. (2002)Mol. Ther. 5:275-282.). However, cancer patients already have suppressed systemic immunity. Further suppressing the immune system could result in severe off-target distribution leading to disseminated infection and a marked increase in adverse events/toxicity. Development of improved systemic delivery strategies are underway. One potential method that has been explored is copper chelation intended to increase stability of oncolytic HSV (oHSV) in the serum (Yoo et al. (2012) Clin. Cancer Res. 18:4931-4941). Another general strategy is retargeting of the virus which can be accomplished in a number of ways including: 1.) altering the viral envelope to contain single chain antibodies (scFv) or peptide ligands specific for a desired receptor (Gatta et al. (2015) PLoS Pathog. 11:e1004907; Leoni et al. (2015) Oncotarget 6:34774-34787; Zhou & Roizman (2006) PNAS 103:5508-5513; Uchida et al. (2013) Mol. Ther. 21:561-569; Shibata et al. (2016) Gene Ther. 23:479-488); 2.) adapters/soluble receptors that recognize tumor and virus to facilitate binding (Kwon et al. (2006) 1 Virol. 80:138-148; Nakano et al. (2005) Mol. Ther. 11:617-626; Baek et al. (2011)Mol Ther. 19:507-514); 3.) inserting glycoproteins with a receptor from other viruses (Sanchala et al. (2017) Front. Pharmacol. 8:270; Lander et al. (2001) Nature 409:860-921; Anderson et al. (2000) J. Virol. 74:2481-2487) and 4.) use of carrier cells (Willmon et al. (2009)Mol. Ther. 17:1667-1676).

[0008] Currently, intratumoral delivery is considered to be the most viable delivery strategy, and the most reliable method to deliver oHSV-1 (Sanchala et al. (2017) Front. Pharmacol. 8:270; Shintani et al. (2011) Virol. J. 8:446). The ability of a live attenuated virus to create a replication niche in the tumor and microenvironment and to even amplify its presence and effect through replication and lysis prevents the need for frequent injections. Some oncolytic viruses even develop a syncytial phenotype which can facilitate rapid spread throughout the tumor and could be helpful when entry receptor expression is low in some instances. A major challenge to utilizing HSV-1 in oncolytic virotherapy is infection efficiency of tumor cells (Sanchala et al. (2017) Front. Pharmacol. 8:270; Shintani et al. (2011) Virol. J. 8:446). Strategies to improve viral spread after intratumoral injection are necessary. Such strategies have so far included injecting multiple tumors or injecting a single tumor in multiple sites; it is advised that doses be given as 3-5 injections or, when given as a single injection, that the volume compose 10-100% of the tumor volume (Sanchala et al. (2017) Front. Pharmacol. 8:270; U.S. Pat. App. Pub. No. 2002/0061298 A1). Improvement in intratumoral delivery has been investigated through the use of ultrasound for cell membrane permeabilization and sonoporation and co-injection of collagenase for improved intratumoral distribution as examples (Shintani et al. (2011) Virol. J. 8:446; McKee et al. (2006) Cancer Res. 66:2509-2513). Chemically sensitizing tumors using small molecules such as histone deacetylase inhibitors to limit IFN activity to improve viral spread has also been explored (Otsuki et al. (2008) Mol. Ther. 16:1546-1555).

[0009] There are advantages and disadvantages to all candidate oncolytic viruses. In many regards, treating tumors with virus is a form of targeted therapy since the lytic effect often depends on the ability of the virus to enter through specific receptors, replicate, and lyse cells. Viral entry receptor expression by tumor cells can vary and may represent a significant challenge. As tumor cells evolve in the tumor microenvironment and new, increasingly malignant subclones emerge, cells that would normally express an entry receptor, may lose expression or expression may become extremely heterogeneous within the tumor. These challenges can potentially be overcome by using viruses that can enter through multiple receptors, such as HSV-1, which can enter through nectin-1, HVEM, or other receptors. Other strategies include retargeting viral tropism through genetic engineering; however, mutations may reduce replication efficiency; additionally, even after retargeting to another receptor type, the same challenge may exist in that receptor expression may be heterogeneous.

[0010] Another challenge is limiting replication to tumor cells, which can present a safety issue. In some instances, intrinsic properties of some tumors naturally allow more efficient replication in comparison to non-transformed, normal cells, such as reovirus's exploitation of cancer cell RAS pathway activation (Alain et al. (2007) Mol. Ther. 15:1512-1521; Marcato et al. (2007)Mol. Ther. 15:1522-1530; Strong et al. (1998) EMBO J. 17:3351-3362). Alternatively, genetic modifications can limit replication by knocking out a factor necessary for replication that is made in excess in rapidly dividing cancer cells. For example, thymidine kinase (TK) is an enzyme known to have increased expression in dividing cells in the G1 phase of the cell cycle and is also necessary for HSV-1 replication since it is critical for DNA synthesis and repair (Gasparri et al. (2009) Eur. J. Cell. Biol. 88:779-785). Deletion of thymidine kinase in HSV-1 therefore prevents replication in cells that are not dividing, greatly reducing the virus's ability to replicate in normal tissue (Whitley & Roizman (2001) Lancet 357:1513-1518; Field & Wildy (1978) J. Hyg. (Load) 81:267-277; Jamieson A T, Gentry & Subak-Sharpe (1974) J. Gen. Virol. 24:465-480).

[0011] A safe and effective replication competent HSV-1 virus will be important to the development of oncolytic virotherapies involving an oHSV expressing an oncolytic protein and cancer vaccines comprising an HSV engineered to express a tumor antigen. HSV has many non-essential genes and can stably carry large fragments of foreign DNA. This genetic flexibility is ideal for the expression of foreign proteins such as, for example, candidate oncolytic proteins and tumor antigens (Murphy et al. (2000) J. Virol 74:7745-7754; Watanabe et al. (2007) Virology 357:186-198). Already recombinant HSV-expressing granulocyte monocyte colony stimulating factor (GM-CSF), a potent chemokine functioning in the maturation of macrophages, is being used in combination with other chemotherapeutics for the treatment of squamous cell cancer of the head and neck with promising phase I/II results (Harrington et al. (2010) Clin. Cancer Res. 16:4005-4015). FDA approval for this particular HSV virotherapy for melanoma is expected to pave the way for the use of live-attenuated HSV-based vectors in new methods for treating or preventing cancer. See also, U.S. Pat. App. Pub. Nos. 2013/0202639 and 2010/0297085.

### BRIEF SUMMARY OF THE INVENTION

[0012] The present invention provides compositions and methods for treating of preventing cancer. The compositions comprise recombinant herpes simplex virus (HSV) genomes. The HSV genomes of the present invention are nucleic acid molecules comprising a modified UL53 gene comprising a deletion corresponding to the region of the UL53 gene that encodes amino acids 31-68 of wild-type glycoprotein K (gK) and a modified UL20 gene comprising a deletion corresponding to the region of the UL20 gene that encodes amino acids 4-22 of wild-type UL20 protein and that further comprises a nucleic acid construct encoding an oncolytic protein or tumor antigen of interest. An HSV comprising a recombinant HSV genome of the present invention is capable of replication in a host cell of interest but is incapable of entry into axonal compartments of neurons, and capable of expressing in the host cell of interest the nucleic acid construct encoding the oncolytic protein or tumor antigen of interest. Preferred host cells are tumor cells, particularly human tumor cells.

[0013] In a preferred embodiment, the present invention provides a recombinant HSV genome that is referred to herein as VC2-ΔgC-NIS and that comprises the nucleotide sequence set forth in SEQ ID NO: 7. VC2-ΔgC-NIS comprises the modifications to the UL53 and UL20 genes described above and further comprises the replacement of the HSV gene (UL44) encoding glycoprotein C (gC) with an expression cassette comprising a nucleotide sequence encoding the Mus musculus sodium iodide symporter (NIS) having the amino acid sequence set forth in SEQ ID NO: 10.

[0014] In addition to the recombinant HSV genomes, the present invention provides herpes simplex viruses (HSVs) comprising a recombinant HSV genome of the present invention, and compositions comprising such HSVs including, but not limited to, compositions for treating or preventing cancer and cancer vaccines.

[0015] The present invention further provides methods for treating or preventing cancer comprising administering to the patient, particularly a human patient, a therapeutically effective amount vaccine of the present invention of a composition comprising an HSV or cancer vaccine of the present invention.

[0016] Additionally provided are methods for producing vaccines, compositions, and viruses comprising a recombinant HSV genome of the present invention.

### BRIEF DESCRIPTION OF THE DRAWINGS

[0017] FIGS. 1A-1G. Radioactive uptake in different ovarian cancer cell lines. Analysis of radioactive uptake of ^{99m}Tc in seven different cell lines (FIGS. 1A-1G). Cell lines 2008, IG-10-pLuc, HM3-pLuc, and SKOV-3-luc (FIGS. 1A, 1C, 1F, and 1G respectively) infected with VC2-NIS showed significantly more uptake compared with the uninfected and those infected with the VC2 virus.

[0018] FIGS. 2A-2B. Dose Effect of VC2-NIS Infection. IG-10-pLuc cells were infected with increasing MOI of VC2-NIS and radioactive uptake of ^{99m}Tc was determined after 24 h. Shown is a standard dose curve (FIG. 2A). A 50% effective dose (ED50) of 0.27 infections units (ifu)/cell was determined using a log curve as shown in FIG. 2B.

[0019] FIGS. 3A-3B. Flow Cytometry Analysis. IG-10-pLuc (FIG. 3A) and SKOV-3-luc (FIG. 3B) cells were analyzed for NIS expression after 24 h infection. VC2-NIS infected cells exhibited an increased fluorescence intensity compared with VC2 infected cells or uninfected control cells.

[0020] FIGS. 4A-4B. Western blot analysis. NIS expression was identified in IG-10-pLuc and SKOV-3-luc cell lines infected with VC2-NIS (FIG. 4A). Arrows show hyper- and hypo-glycoslyated bands. Actin expression (FIG. 4B) was used as a loading control for the samples

[0021] FIGS. 5A-5C. Quantification of Cell Killing Activity. Luciferase activity was determined in HM3-pLuc (FIG. 5A), IG-10-pLuc (FIG. 5B), and SKOV-3-luc (FIG. 5C) cells after infection with VC2-NIS compared with VC2 infected cells or uninfected control cells. Cells infected with VC2 or VC2-NIS showed a transient increase in luciferase activity until 24 hours followed by a decrease in activity indicative of cell death due to oHSV cytolytic activity. The transient increase observed may be due to activation of the CMV promoter driving the luciferase reporter gene stably transfected into the cell lines.

[0022] FIGS. 6A-6B. SPECT/CT Image analysis of VC2-NIS and VC2 infected cells. Shown are (FIG. 6A) transverse and (FIG. 6B) frontal planar images of 35 mm dishes after 24 h infection and 1 h uptake of ^{99m}Tc. The IG-10-pLuc cell line infected with VC2-NIS demonstrated the highest amount of radioactive uptake compared with the SKOV-3-luc and HM3-pLuc cell lines. Cells infected with VC2 showed only background uptake.

[0023] FIG. 7. B16F10 v. B16F10-fLuc-eGFP In Vitro Growth Curve. No significant differences in growth were observed in vitro. Growth fit an exponential growth curve.

[0024] FIG. 8. In Vitro Luciferase Assay. Photon emission significantly correlates with cell number in vitro.

[0025] FIG. 9. In Vivo Luciferase Assay. There was significant correlation with engrafted number of cells and photon emission in vivo. More variation resulted when a higher number of cells are engrafted. 2×10⁵ cells was the lower limit of detection in vivo.

[0026] FIG. 10. B16F10-fLuc-eGFP and B16F10-fLuc-eGFP-nectin-1 In Vitro Growth Curve.

[0027] FIGS. 11A-11-C. In Vitro VC2 Dose-response Curves for B16F10-fLuc-eGFP-nectin-1 (FIG. 11A), B16F10-fLuc-eGFP (FIG. 11B), and Composite (FIG. 11C).

[0028] FIG. 12. In vitro Bioluminescence Cytotoxicity Assay B16F10-fLuc-eGFP and B16F10-fLuc-eGFP-nectin-1.

[0029] FIG. 13. In Vitro VC2 replication curves B16F10-fLuc-eGFP and B16F10-fLuc-eGFP-nectin-1.

[0030] FIGS. 14A-14B. Correlation of bioluminescence and tumor volume in mock-treated (FIG. 14A) and VC2-treated mice (FIG. 14B) during the week of treatment.

[0031] FIG. 15. Kaplan Meier Survival Curve.

[0032] FIG. 16. Decreased growth rates in VC2 treated mice in the week during and after treatment.

[0033] FIGS. 17A-17D. Survival is significantly correlated with tumor growth rates and initial tumor volume at the time treatment was initiated in VC2-treated but not mock-treated mice.

[0034] FIG. 18. Ki-67 proliferation index is markedly significantly decreased in VC2-treated animals.

[0035] FIG. 19. VC2 had increased body weight in comparison to control mice at necropsy and approached significance (P=0.0542).

[0036] FIG. 20. Splenic mass is increased in VC2-treated mice at postmortem examination.

[0037] FIG. 21. Lymphoid hyperplasia was demonstrated in the spleens of VC2-treated mice using morphometric digital image analysis.

### SEQUENCE LISTING

[0038] The nucleotide and amino acid sequences listed in the accompanying sequence listing are shown using standard letter abbreviations for nucleotide bases, and three-letter code for amino acids. The nucleotide sequences follow the standard convention of beginning at the 5′ end of the sequence and proceeding forward (i.e., from left to right in each line) to the 3′ end. Only one strand of each nucleotide sequence is shown, but the complementary strand is understood to be included by any reference to the displayed strand. The amino acid sequences follow the standard convention of beginning at the amino terminus of the sequence and proceeding forward (i.e., from left to right in each line) to the carboxy terminus.

[0039] SEQ ID NO: 1 sets forth the nucleotide sequence of the genome of VC2 which is a modified form of the human herpes simplex virus 1, strain F (“HSV-1(F)”) deletions in the UL20 and UL53 genes. The nucleotide sequence of the genome of HSV-1(F) is publicly available as GenBank Accession No. GU734771.1. The GenBank database can be accessed on the World Wide Web at ncbi.nlm.nih.gov/genbank.

[0040] SEQ ID NO: 2 sets forth the nucleotide sequence of the modified UL20 gene of VC2.

[0041] SEQ ID NO: 3 sets forth the amino acid sequence of the modified UL20 protein that is encoded by the modified UL20 gene of VC2.

[0042] SEQ ID NO: 4 sets forth the nucleotide sequence of the modified UL53 gene of VC2.

[0043] SEQ ID NO: 5 sets forth the amino acid sequence of the modified glycoprotein K (gK) that is encoded by modified UL53 gene of VC2.

[0044] SEQ ID NO: 6 sets forth the nucleotide sequence of VC2-ΔgC, a modified form of the VC2 genome (SEQ ID NO: 1) comprising the deletion of the gene (UL44) encoding glycoprotein C (gC).

[0045] SEQ ID NO: 7 sets forth the nucleotide sequence of the VC2-ΔgC-NIS, a recombinant HSV genome that is a modified form of the VC2 genome (SEQ ID NO: 1) further comprising the replacement of the gene (UL44) encoding glycoprotein C (gC) with an expression cassette comprising a nucleotide sequence encoding the Mus musculus sodium iodide symporter (NIS).

[0046] SEQ ID NO: 8 sets forth the nucleotide sequence encoding the Mus musculus sodium iodide symporter (NIS) that is contained in SEQ ID NO: 7.

[0047] SEQ ID NO: 9 sets forth the coding region of the nucleotide encoding NIS that is set forth in SEQ ID NO: 8. If desired, a stop codon (e.g. TAA, TAG, or TGA) can be operably linked to the 3′ end of a nucleic acid molecule comprising SEQ ID NO: 9. It is noted that the native stop codon of NIS is TGA.

[0048] SEQ ID NO: 10 sets forth the amino acid sequence of NIS.

[0049] SEQ ID NO: 11 sets forth the nucleotide sequence of the expression cassette that is contained in the nucleotide sequence of VC2-ΔgC-NIS provided in SEQ ID NO: 7. The expression cassette comprises in operable linkage the CMV promoter, the nucleotide sequence of the Mus musculus NIS (SEQ ID NO: 7) and the TK poly A signal derived from the pcDNA 3.3 TOPO plasmid (Thermo Fisher Scientific Inc., Waltham, Mass., USA).

[0050] SEQ ID NO: 12 sets forth the amino acid sequence of the Homo sapiens sodium iodide cotransporter (NCBI Reference Sequence NP_000444.1).

[0051] SEQ ID NO: 13-34 set forth the amino acid sequences of peptides shown in Table 1 below.

### DETAILED DESCRIPTION OF THE INVENTION

[0052] The present inventions now will be described more fully hereinafter with reference to the accompanying drawings, in which some, but not all embodiments of the inventions are shown. Indeed, these inventions may be embodied in many different forms and should not be construed as limited to the embodiments set forth herein; rather, these embodiments are provided so that this disclosure will satisfy applicable legal requirements. Like numbers refer to like elements throughout.

[0053] Many modifications and other embodiments of the inventions set forth herein will come to mind to one skilled in the art to which these inventions pertain having the benefit of the teachings presented in the foregoing descriptions and the associated drawings. Therefore, it is to be understood that the inventions are not to be limited to the specific embodiments disclosed and that modifications and other embodiments are intended to be included within the scope of the appended claims. Although specific terms are employed herein, they are used in a generic and descriptive sense only and not for purposes of limitation.

### Overview

[0054] The present invention relates to genetically engineered viruses, particularly herpes simplex viruses (HSVs), that find use in methods for treating and preventing cancer. A herpes simplex virus (HSV) of the present invention comprises a recombinant HSV genome that has been genetically engineered to be incapable of replication in a host cell but incapable of entry into axonal compartments of neurons. An example of an HSV comprising such a recombinant HSV genome is VC2, a genetically engineered HSV-1 that is derived from HSV-1 strain F. See WO 2015/172033, herein incorporated by reference. The recombinant HSV genomes of the present invention have addition been modified to be capable of expressing in a host cell of interest, preferably a human cancer or tumor cell of interest, a nucleic acid construct encoding oncolytic protein or a tumor antigen of interest.

### Definitions

[0055] In the context of this disclosure, a number of terms are used. The following definitions are provided immediately below. Other definitions can be found throughout the disclosure. It is understood that the definitions provided herein are the preferred definitions for the purposes of describing the present invention, unless it is stated otherwise herein or apparent form the context of usage.

[0056] “Oncolytic virotherapy” is intended to mean a treatment using an oncolytic virus (a virus that infects and breaks down cancer cells but not normal cells). Oncolytic virotherapy may make it easier to kill tumor cells with chemotherapy and radiation therapy. It is a type of targeted therapy. Also called “oncolytic virus therapy”, “viral therapy”, and “virotherapy”.

[0057] “Oncolysis” is the lysis (breakdown) of cancer cells that can be caused, for example, by chemical or physical means (for example, strong detergents or high-energy sound waves) or by infection with a strain of virus that can lyse cancer cells.

[0058] An “oncolytic virus” is a type of virus that is capable of infecting and lysing cancer cells but preferably, does not infect normal cells. Oncolytic viruses can occur naturally or can be made in the laboratory by genetically modifying a naturally occurring viruses. The oncolytic viruses of the present invention are non-naturally occurring viruses comprising a genetically engineered genome.

[0059] An “oncolytic composition” is a composition of the present invention comprising an oncolytic virus of the present invention, the genome of which has been modified to express an oncolytic protein. Preferably, the oncolytic virus is a modified HSV-1, more preferably a modified VC2 or variant thereof.

[0060] An “oncolytic protein” that is expressed by an oncolytic virus of the present invention and is capable of promoting or enhancing oncolysis when expressed from a recombinant HSV genome in a cancer cell.

[0061] A “vaccine” is substance or group of substances meant to cause the immune system to respond to a tumor or to microorganisms, such as bacteria or viruses. A vaccine can, for example, help a human body recognize and destroy cancer cells, viruses, or microorganisms.

[0062] A “cancer vaccine” is a vaccine, when administered to a patient, that can be used to treat existing cancer or to prevent the development of a cancer. Vaccines that treat existing cancer are known as “therapeutic cancer vaccines”. Vaccines that prevent the development of a cancer are known as “preventative cancer vaccines”.

[0063] A “tumor antigen” is an antigenic substance produced in tumor cells. Tumor antigens are broadly classified into two groups: tumor-specific antigens, which are present only on tumor cells and not on any other cell; and tumor-associated antigens (TAA), which are present on some tumor cells and also some normal cells.

### Description

[0064] The present invention provides compositions and methods for treating or preventing cancer. Thus, the compositions and methods of the present invention find use in treating or preventing cancer, particularly cancers that are known to afflict humans. While the examples described hereinbelow relate to specific cancers, the compositions and methods are not limited to any particular cancer but are widely adaptable for use in treating or preventing any cancer of interest in a patient. Such cancers of interest include, but are not limited to, acute lymphoblastic leukemia (ALL), acute myeloid leukemia (AML), adrenocortical carcinoma, AIDS-related cancers (e.g. Kaposi sarcoma, aids-related lymphoma, primary CNS), anal cancer, appendix cancer, astrocytomas, atypical teratoid/rhabdoid tumor, central nervous system (brain cancer), basal cell carcinoma of the skin, bladder cancer, bone cancer (e.g. Ewing sarcoma, osteosarcoma, malignant fibrous histiocytoma), brain tumors, breast cancer, bronchial tumors, Burkitt lymphoma, carcinoid tumor (gastrointestinal), carcinoma, cardiac (heart) tumors, atypical teratoid/rhabdoid tumor (brain cancer), embryonal tumors, germ cell tumor, primary CNS lymphoma, cervical cancer, cholangiocarcinoma, chordoma, chronic lymphocytic leukemia (CLL), chronic myelogenous leukemia (CML), chronic myeloproliferative neoplasms, colorectal cancer, craniopharyngioma, cutaneous T-cell lymphoma, ductal carcinoma in situ (DCIS), embryonal tumors (brain cancer), endometrial cancer (uterine cancer), ependymoma, esophageal cancer, esthesioneuroblastoma (head and neck cancer), extragonadal germ cell tumor, eye cancer (e.g. intraocular melanoma, retinoblastoma), fallopian tube cancer, gallbladder cancer, gastric (stomach) cancer, gastrointestinal carcinoid tumor, gastrointestinal stromal tumors (GIST), germ cell tumors (e.g. childhood central nervous system germ cell tumors (brain cancer), childhood extracranial germ cell tumors, extragonadal germ cell tumors, ovarian germ cell tumors, testicular cancer, gestational trophoblastic disease, hairy cell leukemia, head and neck cancer, hepatocellular (liver) cancer, histiocytosis, Langerhans cell, Hodgkin lymphoma, hypopharyngeal cancer (head and neck cancer), intraocular melanoma, pancreatic cancer, Kaposi sarcoma (soft tissue sarcoma), kidney (renal cell) cancer, Langerhans cell histiocytosis, laryngeal cancer (head and neck cancer), leukemia, lip and oral cavity cancer, liver cancer, lung cancer, lymphoma, male breast cancer, malignant fibrous histiocytoma of bone and osteosarcoma, melanoma, Merkel cell carcinoma, mesothelioma, midline tract carcinoma, mouth cancer, multiple endocrine neoplasia syndromes, multiple myeloma/plasma cell neoplasms, myelodysplastic syndromes, myeloproliferative neoplasms, myelodysplastic/myeloproliferative neoplasms, nasal cavity and paranasal sinus cancer, nasopharyngeal cancer, neuroblastoma, non-Hodgkin lymphoma, non-small cell lung cancer, oral cancer, lip and oral cavity cancer, oropharyngeal cancer, ovarian cancer, pancreatic cancer, pancreatic neuroendocrine tumors (islet cell tumors), paraganglioma, paranasal sinus and nasal cavity cancer (head and neck cancer), parathyroid cancer, penile cancer, pharyngeal cancer, pheochromocytoma, pituitary tumor, plasma cell neoplasm/multiple myeloma, primary central nervous system (CNS) lymphoma, primary peritoneal cancer, prostate cancer, rectal cancer, recurrent cancer, renal cell (kidney) cancer, retinoblastoma, salivary gland cancer, sarcoma (e.g. Ewing sarcoma, Kaposi sarcoma, osteosarcoma, soft tissue sarcoma, uterine sarcoma), Sezary syndrome, skin cancer, small cell lung cancer, small intestine cancer, soft tissue sarcoma, squamous cell carcinoma of the skin, testicular cancer, throat cancer (nasopharyngeal cancer, oropharyngeal cancer, hypopharyngeal cancer), thymoma and thymic carcinoma, thyroid cancer, transitional cell cancer of the renal pelvis and ureter, urethral cancer, uterine cancer (e.g. endometrial cancer, uterine sarcoma), vaginal cancer, and, vulvar cancer.

[0065] In some preferred embodiments of the invention, the cancer of interest is selected from the group consisting of melanoma, lung cancer, prostate cancer, pancreatic cancer, breast cancer, colorectal cancer, kidney cancer, bladder cancer, non-Hodgkin's lymphoma, thyroid cancer, endometrial cancer, ovarian cancer, leukemia, and liver cancer. In other preferred embodiments, the cancer of interest is melanoma. In still other preferred embodiments, the cancer of interest is ovarian cancer.

[0066] The present invention provides recombinant HSV genomes and HSVs comprising such recombinant HSV genomes, and other compositions comprising such HSVs, including, for example, cancer vaccines. The recombinant HSV genomes of the present invention comprise: (a) a modified UL53 gene comprising a deletion corresponding to the region of the UL53 gene that encodes amino acids 31-68 of wild-type gK; (b) a modified UL20 gene comprising a deletion corresponding to the region of the UL20 gene that encodes amino acids 4-22 of wild-type UL20 protein; and (c) a nucleic acid construct encoding an oncolytic protein or tumor antigen. An HSV comprising such a recombinant HSV genome is capable of replication in a host cell but incapable of entry into axonal compartments of neurons.

[0067] The recombinant HSV genomes of the present invention can be constructed, for example, from a wild-type HSV-1 or HSV-2 genome using standard genetic engineering methods disclosed elsewhere herein or otherwise known. An example of a wild-type HSV-1 genome is the genome of HSV-1 strain F (GenBank Accession No. GU734771.1; available on the World Wide Web at ncbi.nlm.nih.gov/genbank). An example of a wild-type HSV-2 genome is the genome of HSV-2 strain HG52 (GenBank Accession No. JN561323.2; available on the World Wide Web at ncbi.nlm.nih.gov/genbank).

[0068] In preferred embodiments of the present invention, the genome of VC2 is used to produce the recombinant HSV genomes of the present invention because the VC2 genome already comprises (a) a modified UL53 gene comprising a deletion corresponding to the region of the UL53 gene that encodes amino acids 31-68 of wild-type gK; (b) a modified UL20 gene comprising a deletion corresponding to the region of the UL20 gene that encodes amino acids 4-22 of wild-type UL20 protein. Thus, only the further modification of the VC2 genome to comprise (c) a nucleic acid construct encoding an oncolytic protein or tumor antigen.

[0069] VC2 or other HSV genome can be further modified to comprise the nucleic acid construct encoding an oncolytic protein or tumor antigen by replacing a non-essential HSV gene with the nucleic acid construct encoding an oncolytic protein or tumor antigen or by inserting the nucleic acid construct in an intergenic, non-coding region without affecting virus replication, as long as adjacent genes are not affected. Examples of some non-essential genes include, but are not limited to, UL1, UL5, UL8, UL 27, UL30, UL44, and UL52. For a comprehensive list of essential and non-essential HSV genes, see “The function of herpes simplex virus genes: A primer for genetic engineering of novel vectors.,” National Academy of Sciences, 1996, (NAS Colloquium) Genetic Engineering of Viruses and Viral Vectors, Washington, D.C.: The National Academies Press.

[0070] In one embodiment of the invention, the nucleic acid construct encoding an oncolytic protein or tumor antigen is inserted into or replaces all or at least a portion of UL23, whereby the recombinant HSV genome no longer encodes a functional thymidine kinase. It is recognized that HSV requires thymidine kinase activity to replicate. It is further recognized that actively dividing host cells that are cancer cells comprise thymidine kinase activity that can support HSV replication but non-dividing host cells lack thymidine kinase activity. Thus, in this embodiment of the invention, HSV replication can be limited to actively dividing host cells, particularly cancer cells.

[0071] The nucleic acid construct encoding an oncolytic protein or tumor antigen can encode any oncolytic protein or tumor antigen for any particular cancer of interest. Examples of some oncolytic proteins for ovarian cancer include, for example, Mus musculus sodium iodide symporter (NIS) (SEQ ID NO: 10) and the Homo sapiens sodium iodide cotransporter (SEQ ID NO: 10). Example of some tumor antigens for melanoma are provided below in Table 1 and set forth in SEQ ID NOS: 13-34.

TABLE 1
Examples of melanoma-associated antigens,
peptides, and MHC molecules presenting
those peptides

| | | SEQ | |
|---|---|---|---|
| | | ID | Presenting |
| Proteins | Peptides | NO | MHC |
| MAGE-A1^{a} | EADPTGHSY | 13 | HLA-A1 & B37 |
| MAGE-A1^{a} | TSCILESLFRAVITK | 14 | HLA-DP4 |
| MAGE-A1^{a} | EYVIKVSARVRF | 15 | HLA-DR15 |
| MAGE-A3^{a} | EVDPIGHLY | 16 | HLA-A1 |
| MAGE-A3^{a} | FLWGPRALV | 17 | HLA-A2 |
| MAGE-A3^{a} | VIFSKASSSLQL | 18 | HLA-DR4 |
| NY-ESO-1^{a} | SLLMWITQC | 19 | HLA-A2 |
| NY-ESO-1^{a} | MPFATPMEA | 20 | HLA-B51 |
| NY-ESO-1^{a} | EFYLAMPFATPM | 21 | HLA-DR1 |
| Melan-A/MART-1^{b} | (E)AAGIGILTV | 22 | HLA-A2 |
| Melan-A/MART-1^{b} | EAAGIGILTV | 23 | HLAB35 |
| Melan-A/MART-1^{b} | ILTVILGVL | 24 | HLA-A2 |
| Melan-A/MART-1^{b} | AAGIGILTVILGVL | 25 | HLA-DR1 |
| Tyrosinase^{b} | MLLAVLYCL | 26 | HLA-A2 |
| Tyrosinase^{b} | SSDYVIPIGTY | 27 | HLA-A1 |
| Tyrosinase^{b} | SYLQDSDPDSFQD | 28 | HLA-DR4 |
| gp100/pmel17^{b} | KTWGQYWQV | 29 | HLA-A2 |
| gp100/pmel17^{b} | LIYRRRLMK | 30 | HLA-A3 |
| gp100/pmel17^{b} | GRAMLGTHTMEVTVY | 31 | HLA-DQ6 |
| CDK4^{c} | ACDPHSGHFV | 32 | HLA-A2 |
| beta-catenin^{c} | SYLDSGIHF | 33 | HLA-A24 |
| N-ras^{c} | ILDTAGREEY | 34 | HLA-A1 |

[0072] While the tumor antigen can be a tumor-specific antigen or a tumor-associated antigen, the tumor antigen is a tumor-specific antigen in preferred embodiments of the invention.

[0073] Typically, the nucleic acid construct encoding an oncolytic protein or tumor antigen will be in the form of an expression cassette comprising a promoter operably linked to a coding sequence for the oncolytic protein or tumor antigen. Preferably, the promoter is capable of driving the expression of an operably linked nucleotide sequence (e.g. a coding sequence) in a host cell of interest, particularly a mammalian cell, more particularly a human cell, most particularly a human cancer cell. Examples of some promoters that can be used in the present invention are CMV, EF1a, SV40, PGK1, Ubc, human beta actin, and CAG promoters. If desired, the expression cassette can further comprise one or more additional 5′ and/or 3′ regulatory components such as, example an enhancer and a polyadenylation signal.

[0074] The present invention further provides compositions comprising a recombinant HSV genome of the present invention. Such compositions include, for example, HSVs comprising a recombinant HSV genome of the present invention and cancer vaccines and other compositions comprising such an HSV. The vaccines and compositions can further comprise one or more pharmaceutically acceptable components including, but not limited to, a carrier, an excipient, a stabilizing agent, a preservative, an immunostimulant, and an adjuvant. Each of the pharmaceutically acceptable components is present in the vaccines and immunogenic compositions in a pharmaceutically acceptable amount. Such a pharmaceutically acceptable amount is an amount that is sufficient to produce the desired result (e.g. the amount of stabilizer sufficient to stabilize the vaccine after making and until administration) but is considered safe for administration to an animal, particularly a human.

[0075] The cancer vaccines and other compositions of the present invention can comprise a live HSV and/or an inactivated HSV. Preferably, the vaccines of the present invention comprise a live, attenuated HSV comprising a recombinant HSV genome of the present invention.

[0076] The present invention further provides methods for treating or preventing cancer comprising the step of administering to the patient a therapeutically effective amount of a cancer vaccine of other composition of the present invention. Preferably, the patient is an animal. More preferably, the patient is a human.

[0077] A “therapeutically effective amount” as used herein refers to that amount which provides a therapeutic effect for a given condition and administration regimen. In particular aspects of the invention, a “therapeutically effective amount” refers to an amount of a cancer vaccine or other immunogenic composition of the invention that, when administered to an animal, brings about a positive therapeutic response with respect to the prevention or treatment of the animal for a cancer of interest. A positive therapeutic response with respect to preventing cancer includes, for example, the production of antibodies against the tumor antigen by the animal in a quantity sufficient to protect against development of the cancer. Similarly, a positive therapeutic response in regard to treating a patient for cancer includes curing or ameliorating the symptoms of the cancer such as, example lysing cancer cells. The phrase “therapeutically effective amount” is used herein to mean an amount sufficient to cause an improvement in a clinically significant condition in an animal, particularly a human.

[0078] In some embodiments of the methods of the invention, the therapeutically effective amount of a cancer vaccine or composition of the invention is administered to the patient in a single dose. In other embodiments, the cancer vaccine or composition is administered to the patient in multiple doses. It is recognized that the therapeutically effective amount of a cancer vaccine or composition of the invention can vary depending on the dosing regimen and can even vary from one administration to the next in multiple dosing regimens.

[0079] The present invention additionally provides methods for producing an HSV comprising a recombinant genome of the present invention. The methods comprising transfecting a host cell with the recombinant HSV genome of the present invention and incubating the transfected host cell under conditions favorable for the formation of an HSV virus comprising the recombinant HSV genome, whereby the HSV is produced. Preferably, the host cell is an animal cell and can be either a host cell contained in an animal or an in-vitro-cultured animal cell including, for example, an in-vitro cultured human cell. The conditions under which the transfected host cell is incubated will depend on a number of factors including, but not limited to, the particular host cell, the amount of the recombinant HSV genome that is transfected into the host cell, and the particular HSV that is produced from the recombinant HSV genome. It is recognized that those of skill in the art can determine empirically the optimal conditions for producing a recombinant HSV of the present invention in a transfected host cell by methods described elsewhere herein or otherwise known in the art. The methods can further comprise the optional step of purifying the recombinant HSV virus by separating the recombinant HSV from the cellular components of the host cell using standard methods that are known in the art.

[0080] In a preferred embodiment, the HSV comprises a recombinant HSV genome comprising the deletion of nucleotides 41339 to 41395 and 112160 to 112274 from the genome of HSV-1(F) (GenBank Accession No. GU734771.1) and further comprise a nucleotide sequence encoding an oncolytic protein or tumor antigen. Such a recombinant HSV genome encodes both a modified gK in which amino acids 31 to 68 in the amino terminal region of gK from HSV-1(F) have been deleted and a modified UL20 protein in which amino acids 4-22 in the amino terminal region of the UL20 protein from HSV-1(F) have been deleted. The amino acid sequences of the modified UL20 protein and the modified gK are set forth in SEQ ID NOS: 3 and 5, respectively. Examples of nucleotide sequences encoding the modified UL20 protein and the modified gK are set forth in SEQ ID NOS: 2 and 4, respectively. The VC2 genome of the invention comprises the nucleotide sequences of the modified UL20 and UL53 genes set forth in SEQ ID NOS: 2 and 4, respectively.

[0081] An example of a recombinant HSV genome of the present invention is provided in SEQ ID NO: 7. This recombinant HSV genome is a modified VC2 genome comprising the replacement of the gene (UL44) encoding glycoprotein C (gC) with an expression cassette comprising a nucleotide sequence encoding the Mus musculus sodium iodide symporter (NIS). The nucleotide sequence of the expression cassette is provided in SEQ ID NO: 11.

[0082] Further provided are methods for producing a composition for treating or preventing cancer or a cancer vaccine. The methods involve producing the HSV comprising the recombinant genome essentially as described above. In particular, the methods for producing a composition for treating or preventing cancer or a cancer vaccine comprise transfecting a host cell with the recombinant HSV genome of the invention, incubating the transfected host cell under conditions favorable for the formation of a HSV virus comprising the recombinant HSV genome, purifying the HSV virus comprising the recombinant HSV genome, and optionally, combining the purified HSV virus with at least one pharmaceutically acceptable component.

[0083] A composition for treating or preventing cancer or a cancer vaccine of the present invention can comprise one or more pharmaceutically acceptable components including, but not limited to, a carrier, an excipient, a stabilizing agent, a preservative, an immunostimulant, and an adjuvant. In general, a pharmaceutically acceptable component does not itself induce the production of an immune response in the animal receiving the component and can be administered without undue toxicity in composition of the present invention. As used herein, the term “pharmaceutically acceptable” means being approved by a regulatory agency of the Federal or a state government or listed in the U.S. Pharmacopia, European Pharmacopia or other generally recognized pharmacopia for use in vertebrates, and more particularly in humans. These compositions can be useful as a vaccine and/or antigenic compositions for inducing a protective immune response in a vertebrate.

[0084] Carriers include but are not limited to saline, buffered saline, dextrose, water, glycerol, sterile isotonic aqueous buffer, and combinations thereof. A thorough discussion of pharmaceutically acceptable carriers, diluents, and other excipients is presented in Remington's Pharmaceutical Sciences (Mack Pub. Co. N.J. current edition), herein incorporated in its entirety by reference. The formulation should suit the mode of administration. In a preferred embodiment, the formulation is suitable for administration to humans, preferably is sterile, non-particulate and/or non-pyrogenic.

[0085] Examples of stabilizing agents, immunostimulants, and adjuvants include alum, incomplete Freud's adjuvant, MR-59 (Chiron), muramyl tripeptide phosphatidylethanolamide, and mono-phosphoryl Lipid A. Preservatives include, for example, thimerosal, benzyl alcohol, and parabens. Such stabilizing agents, adjuvants, immune stimulants, and preservatives are well known in the art and can be used singly or in combination.

[0086] Pharmaceutically acceptable components can include, for example, minor amounts of wetting or emulsifying agents, or pH buffering agents. The composition can be a solid form, such as a lyophilized powder suitable for reconstitution, a liquid solution, suspension, emulsion, tablet, pill, capsule, sustained release formulation, or powder. Oral formulation can include standard carriers such as pharmaceutical grades of mannitol, lactose, starch, magnesium stearate, sodium saccharine, cellulose, magnesium carbonate, and the like.

[0087] Certain methods of the invention involve administering a therapeutically effective amount of a composition for treating or preventing cancer or a cancer vaccine to a patient. The methods of the present invention do not depend on a particular method of administering the composition for treating or preventing cancer or the cancer vaccine to the patient. For example, the composition for treating or preventing cancer or the cancer vaccine can be administered orally, intratumorally, intradermally, intranasally, intramuscularly, intraperitoneally, intravenously, or subcutaneously using routine methods known in the art or disclosed elsewhere herein. In preferred embodiments of the invention, the composition for treating or preventing cancer and the cancer vaccine are administered intratumorally.

[0088] The recombinant HSV genomes of the present invention comprise nucleotide sequences which are modified by methods disclosed herein or otherwise known in the art so as to produce a recombinant HSV genome. A virus comprising the recombinant HSV genome of the present invention is capable of replication in a host cell and incapable of entry into axonal compartments of neurons. Variant recombinant HSV genomes encompassed by the present invention have at least about 80%, 85%, 90%, 91%, 92%, 93%, 94%, 95%, 96%, 97%, 98%, 99% or more sequence identity to the full-length nucleotide sequences set forth in SEQ ID NO: 11, respectively. Viruses comprising such variant recombinant HSV genomes are capable of replication in a host cell and incapable of entry into axonal compartments of neurons.

[0089] The present invention additionally encompasses variant recombinant HSV genomes that comprise variant forms of any one or more of the individual genes within a recombinant HSV genome, but not limited to UL53, UL20, and the oncolytic protein or tumor antigen of interest. For example, VC2-ΔgC-NIS (SEQ ID NO: 7) can comprise a variant nucleotide sequence encoding a NIS protein this identical to the amino acid sequence forth in SEQ ID NO: 10 or a variant NIS protein that comprises sodium-iodide transporter activity when expressed in a host cell. It is recognized that sodium-iodide transporter activity can be assayed by methods disclosed elsewhere herein or otherwise known in the art.

[0090] A gene or nucleotide sequence encoding a variant oncolytic protein or tumor antigen in the recombinant HSV genomes encompassed by the present invention has at least about 80%, 85%, 90%, 91%, 92%, 93%, 94%, 95%, 96%, 97%, 98%, 99% or more sequence identity to the corresponding full-length nucleotide sequence of that gene or nucleotide sequence in a recombinant HSV genome disclosed herein or encode a protein having at least about 80%, 85%, 90%, 91%, 92%, 93%, 94%, 95%, 96%, 97%, 98%, 99% or more sequence identity to the corresponding full-length amino acid sequence of the corresponding non-variant protein.

[0091] The present invention provides compositions and methods for treating of preventing cancer. The compositions comprise recombinant herpes simplex virus (HSV) genomes. The HSV genomes of the present invention are nucleic acid molecules comprising a modified UL53 gene comprising a deletion corresponding to the region of the UL53 gene that encodes amino acids 31-68 of wild-type glycoprotein K (gK) and a modified UL20 gene comprising a deletion corresponding to the region of the UL20 gene that encodes amino acids 4-22 of wild-type UL20 protein and that further comprises a nucleic acid construct encoding an oncolytic protein or tumor antigen of interest.

[0092] The present invention encompasses isolated or substantially purified polynucleotide (also referred to herein as “nucleic acid molecule”, “nucleic acid” and the like) or protein (also referred to herein as “polypeptide”) compositions. An “isolated” or “purified” polynucleotide or protein, or biologically active portion thereof, is substantially or essentially free from components that normally accompany or interact with the polynucleotide or protein as found in its naturally occurring environment. Thus, an isolated or purified polynucleotide or protein is substantially free of other cellular material or culture medium when produced by recombinant techniques, or substantially free of chemical precursors or other chemicals when chemically synthesized. Optimally, an “isolated” polynucleotide is free of sequences (optimally protein encoding sequences) that naturally flank the polynucleotide (i.e., sequences located at the 5′ and 3′ ends of the polynucleotide) in the genomic DNA of the organism from which the polynucleotide is derived. For example, in various embodiments, the isolated polynucleotide can contain less than about 5 kb, 4 kb, 3 kb, 2 kb, 1 kb, 0.5 kb, or 0.1 kb of nucleotide sequence that naturally flank the polynucleotide in genomic DNA of the cell from which the polynucleotide is derived. A protein that is substantially free of cellular material includes preparations of protein having less than about 30%, 20%, 10%, 5%, or 1% (by dry weight) of contaminating protein. When the protein of the invention or biologically active portion thereof is recombinantly produced, optimally culture medium represents less than about 30%, 20%, 10%, 5%, or 1% (by dry weight) of chemical precursors or non-protein-of-interest chemicals.

[0093] “Variants” is intended to mean substantially similar sequences. For polynucleotides, a variant comprises a polynucleotide having deletions (i.e., truncations) at the 5′ and/or 3′ end; deletion and/or addition of one or more nucleotides at one or more internal sites in the native polynucleotide; and/or substitution of one or more nucleotides at one or more sites in the native polynucleotide. As used herein, a “native” polynucleotide or polypeptide comprises a naturally occurring nucleotide sequence or amino acid sequence, respectively. Generally, variants of a particular recombinant HSV genome of the invention will have at least about 80%, 85%, 90%, 91%, 92%, 93%, 94%, 95%, 96%, 97%, 98%, 99% or more sequence identity to the recombinant HSV genome as determined by sequence alignment

[0094] “Variant” protein is intended to mean a protein derived from the native protein by deletion (so-called truncation) of one or more amino acids at the N-terminal and/or C-terminal end of the native protein; deletion and/or addition of one or more amino acids at one or more internal sites in the native protein; or substitution of one or more amino acids at one or more sites in the native protein. Such variants may result from, for example, genetic polymorphism or from human manipulation. Biologically active variants of a protein will have at least about 80%, 85%, 90%, 91%, 92%, 93%, 94%, 95%, 96%, 97%, 98%, 99% or more sequence identity to the amino acid sequence for the native protein as determined by sequence alignment programs and parameters described elsewhere herein. A biologically active variant of a protein of the invention may differ from that protein by as few as 1-15 amino acid residues, as few as 1-10, such as 6-10, as few as 5, as few as 4, 3, 2, or even 1 amino acid residue.

[0095] The proteins of the invention may be altered in various ways including amino acid substitutions, deletions, and insertions. Methods for such manipulations are generally known in the art. Methods for mutagenesis and polynucleotide alterations are well known in the art. See, for example, Kunkel (1985) Proc. Natl. Acad. Sci. USA 82:488-492; Kunkel et al. (1987) Methods in Enzymol. 154:367-382; U.S. Pat. No. 4,873,192; Walker and Gaastra, eds. (1983) Techniques in Molecular Biology (MacMillan Publishing Company, New York) and the references cited therein. Guidance as to appropriate amino acid substitutions that do not affect biological activity of the protein of interest may be found in the model of Dayhoff et al. (1978) Atlas of Protein Sequence and Structure (Natl. Biomed. Res. Found., Washington, D.C.), herein incorporated by reference. Conservative substitutions, such as exchanging one amino acid with another having similar properties, may be optimal.

[0096] The deletions, insertions, and substitutions of the protein sequences encompassed herein are not expected to produce radical changes in the characteristics of the protein except for those changes that are disclosed herein. However, when it is difficult to predict the exact effect of the substitution, deletion, or insertion in advance of doing so, one skilled in the art will appreciate that the effect will be evaluated by routine screening assays. That is, the activity can be evaluated by assays that are disclosed hereinbelow.

[0097] Variant polynucleotides and proteins also encompass sequences and proteins derived from a mutagenic and recombinogenic procedure such as DNA shuffling. Strategies for such DNA shuffling are known in the art. See, for example, Stemmer (1994) Proc. Natl. Acad. Sci. USA 91:10747-10751; Stemmer (1994) Nature 370:389-391; Crameri et al. (1997) Nature Biotech. 15:436-438; Moore et al. (1997) J. Mol. Biol. 272:336-347; Zhang et al. (1997) PNAS 94:4504-4509; Crameri et al. (1998) Nature 391:288-291; and U.S. Pat. Nos. 5,605,793 and 5,837,458.

[0098] PCR amplification methods can be used in making the recombinant HSV genomes of the present invention. Methods for designing PCR primers and PCR cloning are generally known in the art and are disclosed in Sambrook et al. (1989) Molecular Cloning: A Laboratory Manual (2d ed., Cold Spring Harbor Laboratory Press, Plainview, N.Y.). See also Innis et al., eds. (1990) PCR Protocols: A Guide to Methods and Applications (Academic Press, New York); Innis and Gelfand, eds. (1995) PCR Strategies (Academic Press, New York); and Innis and Gelfand, eds. (1999) PCR Methods Manual (Academic Press, New York). Known methods of PCR include, but are not limited to, methods using paired primers, nested primers, single specific primers, degenerate primers, gene-specific primers, vector-specific primers, partially mismatched primers, and the like.

[0099] It is recognized that the recombinant HSV genomes of the present invention encompass other nucleic acid molecules comprising a nucleotide sequence that is sufficiently identical to a nucleotide sequence disclosed herein. The term “sufficiently identical” is used herein to refer to a first amino acid or nucleotide sequence that contains a sufficient or minimum number of identical or equivalent (e.g., with a similar side chain) amino acid residues or nucleotides to a second amino acid or nucleotide sequence such that the first and second amino acid or nucleotide sequences have a common structural domain and/or common functional activity. For example, amino acid or nucleotide sequences that contain a common structural domain having at least about 80% identity, preferably or 85% identity, more preferably 90% or 95% identity, most preferably 96%, 97%, 98% or 99% identity, are defined herein as sufficiently identical.

[0100] To determine the percent identity of two amino acid sequences or of two nucleic acids, the sequences are aligned for optimal comparison purposes. The percent identity between the two sequences is a function of the number of identical positions shared by the sequences (i.e., percent identity=number of identical positions/total number of positions (e.g., overlapping positions)×100). In one embodiment, the two sequences are the same length. The percent identity between two sequences can be determined using techniques similar to those described below, with or without allowing gaps. In calculating percent identity, typically exact matches are counted.

[0101] The determination of percent identity between two sequences can be accomplished using a mathematical algorithm. A preferred, nonlimiting example of a mathematical algorithm utilized for the comparison of two sequences is the algorithm of Karlin and Altschul (1990) Proc. Natl. Acad. Sci. USA 87:2264, modified as in Karlin and Altschul (1993) Proc. Natl. Acad. Sci. USA 90:5873-5877. Such an algorithm is incorporated into the NBLAST and XBLAST programs of Altschul et al. (1990) J. Mol. Biol. 215:403. BLAST nucleotide searches can be performed with the NBLAST program, score=100, wordlength=12, to obtain nucleotide sequences homologous to the polynucleotide molecules of the invention. BLAST protein searches can be performed with the XBLAST program, score=50, wordlength=3, to obtain amino acid sequences homologous to protein molecules of the invention. To obtain gapped alignments for comparison purposes, Gapped BLAST can be utilized as described in Altschul et al. (1997) Nucleic Acids Res. 25:3389. Alternatively, PSI-Blast can be used to perform an iterated search that detects distant relationships between molecules. See Altschul et al. (1997) supra. When utilizing BLAST, Gapped BLAST, and PSI-Blast programs, the default parameters of the respective programs (e.g., XBLAST and NBLAST) can be used. LAST, Gapped BLAST, and PSI-Blast, XBLAST and NBLAST are available on the World Wide Web at ncbi.nlm.nih.gov. Another preferred, non-limiting example of a mathematical algorithm utilized for the comparison of sequences is the algorithm of Myers and Miller (1988) CABIOS 4:11-17. Such an algorithm is incorporated into the ALIGN program (version 2.0), which is part of the GCG sequence alignment software package. When utilizing the ALIGN program for comparing amino acid sequences, a PAM120 weight residue table, a gap length penalty of 12, and a gap penalty of 4 can be used. Alignment may also be performed manually by inspection.

[0102] Unless otherwise stated, sequence identity/similarity values provided herein refer to the value obtained using the full-length sequences of the invention using BLAST with the default parameters; or any equivalent program thereof. By “equivalent program” is intended any sequence comparison program that, for any two sequences in question, generates an alignment having identical nucleotide or amino acid residue matches and an identical percent sequence identity when compared to the corresponding alignment generated by BLAST using default parameters.

[0103] As used herein, the term “operably linked” is intended to mean a functional linkage between two or more elements. For example, an operable linkage between a polynucleotide or gene of interest and a regulatory sequence (i.e., a promoter) is functional link that allows for expression of the polynucleotide of interest. Operably linked elements may be contiguous or non-contiguous. When used to refer to the joining of two protein coding regions, by operably linked is intended that the coding regions are in the same reading frame.

[0104] As used herein unless stated otherwise or apparent from the context of usage, a host cell is an animal cell, preferably a mammalian cell, more preferably a human cell. Similarly, a host or host organism is an animal, preferably a mammal, more preferably a human.

[0105] The following examples are offered by way of illustration and not by way of limitation.

### Example 1

### HSV-1-Mediated Oncolytic Virotherapy for Treating Ovarian Cancer

[0106] Ovarian cancer has the fifth highest mortality rate of cancer deaths amongst women and accounts for the most deaths of all other female reproductive cancers. To date, there are limited therapeutic options for advanced disease. Oncolytic virotherapy uses viruses that are derived or engineered from naturally occurring viruses to target and specifically kill cancer cells, leaving normal cells unaffected. Oncolytic herpes simplex viruses (oHSVs) have shown promise in cancer therapy and have received FDA approval in treating melanoma. Our aim was to determine the efficacy of an attenuated oHSV-1 vector, constructed to express the sodium iodide symporter (NIS) gene (VC2-NIS) for monitoring infection and spread in tumors.

[0107] As disclosed hereinbelow, an expression comprising the NIS reporter gene, when inserted into the parental VC2 oncolytic HSV-1 vector, can be used to kill ovarian cancer cells and to monitor infection and spread using radioactive technetium.

### Methods

[0108] Step 1: Identify which human (2008, SKOV3-luc) and mouse (IG-10-pLuc, HM3-pLuc, LM1, LM3, MOVCAR-2) ovarian cancer cell lines are capable of infection by the virus (VC2-NIS).
   [0109] Radioactive ^{99m}Tc uptake was used as a surrogate to monitor NIS reporter activity in cells infected for 24 h with VC2-NIS, and uptake in cells infected with a control virus (VC2) was compared to uptake in uninfected cells.
[0110] Step 2: Identify the dose effect of VC2-NIS infection on the cell lines.
   [0111] The amount (MOI) of virus used to infect cells was varied and the impact on NIS reporter expression was determined by assessing ^{99m}Tc uptake. NIS expression in VC2-NIS infected cells was monitored by Western blot and flow cytometry analyses.
[0112] Step 3: Quantify the amount of cells killed by the VC2-NIS virus.
   [0113] A luciferase assay was used to measure cell viability after VC2-NIS infection in luciferase-expressing cell lines, and activity in cells infected with a control virus (VC2) compared was compared to activity in uninfected cells.
[0114] Step 4: Monitor ^{99m}Tc uptake in cells infected with VC2-NIS in vitro by single photon emission computed tomography (SPECT) imaging.
   [0115] The IG-10-pLuc, HM3-pLuc, and SKOV-3-luc cell lines were plated in 35 mm tissue culture dishes and infected for 24 h with VC2-NIS. Uptake of ^{99m}Tc was compared to cells infected with a control virus (VC2) or to uninfected cells. SPECT imaging was used to monitor ^{99m}Tc after a 1 h. A CT scan was also obtained to provide localization of the SPECT signal.

### Discussion

[0116] Infection of ovarian cancer cells with VC2-NIS resulted in robust NIS expression detected in 2008, HM3-pLuc, IG-10-pLuc, and SKOV-3-luc cells as determined by ^{99m}Tc uptake (FIGS. 1A-1G and 2A-2B), flow cytometry analysis (FIGS. 3A-3B) western blot analysis (FIGS. 4A-4B), and SPECT/CT imaging (FIGS. 6A-6B).

[0117] An increase in ^{99m}Tc uptake was not observed in LM1 (FIG. 1D), LM3 (FIG. 1B), and MOVCAR-2 cells (FIG. 1E), possibly due to high endogenous levels of NIS gene expression.

[0118] In FIGS. 5A-5C, the transient increase in luciferase activity we observed was unexpected. The luciferase expressing cell lines were produced by stable transfection of plasmids in which the luciferase reporter was driven by a cytomegalovirus (CMV) promoter. This result led to the hypothesis that VC2-NIS infection was activating the CMV promoter. This result was confirmed by infecting cells with the VC2 virus. A similar pattern of transient luciferase increase was found, supporting oHSV viral activation of luciferase activity after infection.

### Conclusions

[0119] These studies demonstrate that VC2-NIS oHSV (SEQ ID NO: 7) has the capability for tracking and killing ovarian cancer cells in vitro. Moreover, oncolytic virotherapy methods for treating cancer comprising the administration of both VC2-NIS oHSV can be combined with radiotherapy methods involving the administration of a radioisotope, such as, for example, ¹³¹I. Finally, the oncolytic virotherapy approaches disclosed hereinabove can also be combined with cancer immunotherapy using immune checkpoint inhibitors.

### Example 2

### Development of a Murine Melanoma Model for Testing Immunomodulatory and Oncolytic Herpes Simplex Virus-1

### Summary

[0120] Viruses that preferentially lyse cancer cells are described as being “oncolytic” or “tumor-lysing”. Many different viruses have been tested as potential therapy for cancer. Herpes Simplex Virus type-1 (HSV-1) has long been hailed as a promising virus for the development of oncolytic virotherapy, and the first virus to receive FDA approval is an engineered HSV-1, Talimogene Laherperavec/T-VEC/Imlygic. Despite promising preclinical data in mouse models, T-VEC has shown variable efficacy in clinical trials involving human patients with metastatic melanoma. The exact mechanism for lack of response in the majority of human patients is unknown, but more efficacious and safe treatment strategies are needed. We previously demonstrated strong protective cell-mediated and humoral immune responses in VC2-vaccinated mice challenged with HSV-1 and HSV-2 after a single intramuscular vaccination. We hypothesized that the strong immunogenicity of VC2 could induce anti-tumor immune responses when injected into melanoma tumors in mice. VC2 has a significant safety advantage in that it contains specific deletions that make it unable to enter ganglionic axons and establish latency but replicates efficiently in other permissible cell types. We developed an immunocompetent, syngeneic murine melanoma model double-labeled with firefly luciferase and enhanced green fluorescent protein (B16F10-fLuc-eGFP) to test VC2 for anti-tumor effects. We additionally created a stably transfected cell line expressing human nectin-1 (B16F10-fLuc-eGFP-nectin-1) and observed enhanced cytolysis and viral replication in vitro. However, in vitro cytotoxicity assays cannot account for immune-mediated anti-tumor effects and immunogenic cell death. In fact, it has been reported that, regarding oncolytic HSV, in vitro cytotoxicity and viral persistence in vivo do not correlate with anti-tumor efficacy; it has instead been shown that expression of markers of immunogenic cell death, increased antigen presenting cells, and T cell responses may be more likely associated with HSV-associated therapeutic benefits (Workenhe et al. (2014) Mol. Ther. 22:123-131). We therefore utilized the B16F10-fLuc-eGFP model system developed in our laboratory to test VC2 for anti-tumor effects. The lack of nectin-1 receptors and poor immunogenicity of B16F10 murine melanoma may make it a good model for human melanoma patients that are unresponsive to current oncolytic HSV-1 therapy and other immune-modulating strategies. We found that, even in this difficult to treat model, VC2-treated mice had a median survival time (MST) almost twice that of mock-treated controls. Survival times were significantly negatively correlated with tumor size at the initiation of VC2 therapy, a dose-dependent effect. Further, there was significant infiltration of macrophages and T cells in the tumor microenvironment of VC2-treated mice owing to the remarkable immunogenicity of the virus. We demonstrated utility of the model in assessing response to therapy with increased sensitivity using bioluminescent imaging in the face of tumor pseudoprogression which may cause response to treatment to be underestimated in preclinical mouse studies involving immunotherapy development. Results of VC2 testing in our novel murine melanoma model system suggest the strong immunogenicity of VC2 make it a good candidate for viral vector development using a variety of oncolytic virotherapy and vectored tumor vaccine strategies. Future directions involve modeling dosing and combinatorial strategies which more accurately account for the variable sensitivity to oncolytic HSV-1 in human melanoma patients. Development of safe and efficacious dosing strategies based on tumor sensitivity aims to improve predictive value of preclinical testing in preparation for clinical trials.

### Introduction

[0121] Viruses that preferentially lyse cancer cells are described as being “oncolytic” or tumor-lysing. Many different viruses have been tested as potential therapy for cancer in the last century, beginning as early as 1910, when a live-attenuated Rabies vaccine was observed to result in regression of cervical cancer in a patient (Sinkovics & Horvath (2008) Arch. Immunol. Ther. Exp. 56 Suppl 1:3s-59s). The field has expanded to include many different viruses and has become increasingly sophisticated as molecular tools to create purposeful viral genetic mutations that enhance cancer-killing abilities and safety have become more widely available. Some viruses have a natural lytic phase in their life cycle and have a natural affinity for rapidly dividing cells (e.g. herpes simplex virus type-1 and parvoviruses).

[0122] Herpes Simplex Virus type-1 (HSV-1) has long been hailed as a promising virus for the development of oncolytic virotherapy. The reasons cited are many. HSV-1 has a large genome with a number of non-essential genes that can be deleted to reduce pathogenicity or for insertion of therapeutic transgenes. Additionally, antiviral drugs exist which can control acute infection in the event of viral dissemination and/or adverse events. In the 1990's, the prospect of using viruses to treat tumors using an attenuated TK-negative HSV mutant showed promise in treating gliomas in a xenogenic mouse model after intratumoral injection (Martuza et al. (1991) Science 252:854-856). Twenty-five years later, the first ever oncolytic virotherapy was approved by the FDA for the treatment of metastatic melanoma in people, a mutated HSV-1 virus referred to as Talimogene Laherperavec (T-VEC) or Imlygic. T-VEC is a mutated oncolytic HSV-1 based virus with mutations in infectious cell protein (ICP) 34.5 and ICP47, while expressing US11 and human granulocyte macrophage-colony stimulating factor (GM-CSF). Viral expression of human GM-CSF was intended to improve antitumor immune responses and has demonstrated efficacy in some murine tumor models (Toda et al. (2000) Mol. Ther. 2:324-329). Tumor growth inhibition and/or regression was observed in xenogenic mouse models and in the syngeneic A20 B cell lymphoma model. While the aforementioned preclinical studies showed impressive results in murine models, efficacy in human clinical trials has shown more variability with only a small subset of patients having durable responses. Further, adverse effects including herpetic oral lesions, viral dissemination, and herpetic keratitis have reportedly been associated with treatment in some patients. The reason that only a small subset of patients responds and yet others experience adverse effects is unknown, but more widely efficacious and safe treatment strategies are needed for melanoma patients.

[0123] Some preclinical studies involving oncolytic HSV-1 mutants have shown that rapid infection and spread in vitro predicts better in vivo response; however, such studies have been most often performed in xenogeneic models and account only for direct lysis secondary to viral replication but do not account for host immune responses (Wollmann et al. (2005) J. Virol. 79:6005-6022; Bennett et al. (2002) Cancer Gene Ther. 9:935-945). The efficiency with which HSV-1 infects, spreads, replicates and directly lyses cells may depend on both virus and host-specific factors. Viral factors include the presence or absence of ICP34.5, for example; in its absence, protein shutoff by the host is permanent and the virus fails to efficiently replicate, limiting spread and replicative lysis of the cell. This is a common deletion in oncolytic HSV-1 mutants tested in clinical trials since it is a neurovirulence factor and inhibits the virus's ability to grow in non-neoplastic cells; however, the reduced ability of the virus to replicate may also reduce potency in inducing anti-tumor effects. Host factors may include the presence or absence of HSV-1 entry receptors such as nectin-1 and HVEM. In fact, nectin-1 expression has been identified as a marker of sensitivity to oncolytic HSV-1 in a xenogeneic squamous cell carcinoma mouse model; there was no correlation between therapeutic responses and HVEM expression (Yu et al. (2007) Mol. Ther. 15:103-113). It is difficult to know, however, if this result would translate to human patients with intact immune systems.

[0124] There is disagreement among researchers working in oncolytic virotherapy development on the importance of tumor cell lysis versus stimulation of immune response by the virus. Some would argue that spread, persistence and continued replication within the tumor and/or microenvironment are less important than immunogenicity of the virus and the immune response in the early stages of viral infection 119. In fact, it has been reported that, regarding oncolytic HSV, in vitro cytotoxicity and viral persistence in vivo do not correlate with anti-tumor efficacy; it has instead been shown that expression of markers of immunogenic cell death, such as heat shock protein 70 and elevated levels of serum high mobility group box 1 (HMGB1), increased antigen presenting cells, and CD8+ T cell responses may be more likely associated with HSV-associated therapeutic benefits (Workenhe et al. (2014) Mol. Ther. 22:123-131).

[0125] Based on these observations in the literature which highlight the importance of immunogenicity over direct cytotoxicity in oncolytic HSV-1 virotherapy, we aimed to test the ability of VC2, a highly immunogenic HSV-1 live-attenuated virus genetically engineered in our laboratory, to generate an anti-tumor response in absence of robust replicative cell lysis. We previously reported that a single, intramuscular vaccination with VC2, an HSV-1 live-attenuated vaccine strain generated in our laboratory, resulted in protective, strong cell-mediated and humoral immune responses against lethal challenge with HSV-1 and HSV-2 in mice (Stanfield et al. (2014) PLoS One 9:e109890). We hypothesized that VC2 could generate a therapeutic immune response in the TME in the poorly immunogenic B16F10 syngeneic murine melanoma model. We also previously showed that VC2 replicates as efficiently as the parental F strain but cannot enter ganglionic axons due to a specific mutation in UL20 and glycoprotein K (gK) due to its inability to enter by fusion. This confers a significant safety advantage by preventing the establishment of latency, while still allowing efficient replication in permissible cells. As mentioned, oncolytic HSV-1 mutants developed for clinical trials typically include a deletion in late gene γ34.5 as a safety feature because of its association with neurovirulence, but this mutation significantly dampens viral replication, which may limit therapeutic effect. VC2 overcomes this problem by allowing efficient replication in permissible cells without compromising overall safety.

[0126] Safety and efficacy studies in immune-oncology are generally performed in GEM or syngeneic models since an intact immune system is necessary for evaluating efficacy in immune-stimulating therapeutics and for assessing for immunotoxic effects (Li et al. (2017) Pharmacol. Ther. 173:34-46). We chose the syngeneic, immunocompetent B16F10 murine melanoma model over a xenogeneic model in order to evaluate immune response to VC2 virotherapy rather than direct cytotoxic/lytic effects of the virus. The B16F10 model is a notoriously difficult tumor model in which to elicit a therapeutic response due to its aggressively growing nature. Based on the lack of HSV-1 entry receptors and the known poor immunogenicity of the B16F10 cell line (reference), we consider the syngeneic B16F10 murine melanoma model to be a good model for human melanoma patients which respond poorly to current oncolytic virotherapy and other immune modulating cancer therapies, which represent the majority of patients in clinical trials to date. These are the patients with the greatest need for more efficacious and safe therapies and therefore are our target population.

[0127] We have further enhanced the model by utilizing B16F10 cells expressing enhanced green fluorescent protein (eGFP) and firefly luciferase (fLuc) for advanced fluorescent microscopy and in vivo tumor monitoring capabilities (B16F10-fLuc-eGFP), respectively. Bioluminescence is the most sensitive method for monitoring tumor progression in vivo. Most often, luciferase-expressing cancer cells are used in models where tumor cells are implanted internally or in experimental metastasis models where the tumor cells are injected directly into the vascular system. In our model system, tumor cells are orthotopically engrafted intradermally in the poorly haired region of the pinna for the ease of visual monitoring and measuring tumors with microcalipers. However, response to therapies intended to stimulate an immune response against tumors are difficult to monitor by traditional microcaliper measurements due to pseudoprogression. Pseudoprogression is the appearance of disease progression clinically or via diagnostic imaging that is occasionally seen in cancer patients receiving immunotherapy treatment. The precise mechanism is poorly defined, but it is hypothesized that pseudoprogression is the result of tumor enlargement secondary to acute inflammation and necrosis, which represent the intended effects of stimulating an immune response against the tumor, rather than true proliferation of the tumor cells. This phenomenon has been observed in melanoma patients being treated with immune checkpoint inhibitors including nivolumab and ipilimumab who show a discrepancy between overall survival time and progression-free interval; patients may appear to acutely progress in response to treatment but ultimately show response manifested as improved overall survival down the road. In most transplantable murine melanoma models, the time frame for generating a therapeutic response with a candidate drug is short. The course of in vivo experiments is limited by outgrowth of the primary tumor since the tumors grow rapidly and often ulcerate quickly after a tumor has become macroscopically visible necessitating euthanasia. When the time course for evaluation of therapeutic response may be as short as one week, sensitive assessment of early response to drugs is critical. As pseudoprogression may result in premature discontinuation of drugs in human patients in clinical trials, it may also lead to premature discontinuation of testing of promising therapeutic in preclinical trials with mouse models. In clinical trials with human patients, treatment may be discontinued, and overall therapeutic efficacy may still be observed as improved overall survival times in some cases. However, in preclinical testing, mice may be euthanized prematurely due to the appearance of rapid tumor growth in response to immune modulating drugs and effect the overall survival times and ultimately the outcome of whether or not to continue the drug development strategy. We aimed to develop an immunocompetent murine melanoma model that allows sensitive observation of tumor growth during immunomodulatory therapy with the highly immunogenic HSV-1 vaccine strain developed in our laboratory, VC2. We developed a model that can detect acute responses using in vivo imaging with greater sensitivity than traditional microcaliper measurement. This model system will be invaluable in evaluating acute response to treatment and testing dosing and combinatorial strategies with higher sensitivity and greater efficiency that traditional microcaliper measurement.

[0128] Tumor heterogeneity is also a significant challenge in treating tumors in human patients with targeted therapies including oncolytic viruses and immunotherapies. Nectin-1 expression has been found to be a factor in sensitivity to oncolytic HSV-1 in a xenogeneic immunodeficient murine squamous cell carcinoma model. Therefore, we further created a stably transformed B16F10-fLuc-eGFP murine melanoma cell line that expresses human nectin-1. Modeling patient factors that determine efficacy and safety is critical to developing efficacious and safe dosing regimens in the age of precision medicine. The ability to test dosing strategies on mice with nectin-1 positive versus nectin-1 negative melanoma tumors may be helpful for developing dosing strategies based on patient tumor receptor expression.

[0129] Herein, we describe our modeling strategy and results of preliminary efficacy and safety testing of VC2 in a syngeneic, immunocompetent murine melanoma model. Due to potential advantages in replication and safety over the currently available oncolytic virotherapy, and due to the previously demonstrated remarkable immunogenicity of VC2, we aimed to test for efficacy in inhibiting tumor growth and extending survival times in our double-labeled B16F10 syngeneic murine melanoma model in absence of nectin-1 expression and direct, replicative cell lysis. We further aimed to screen for safety and evaluate direct effects on tumor cell proliferation and immune cell infiltration in the TME.

### Methods

### Cells

[0130] B16F10 cells expressing enhanced green fluorescent protein (eGFP) and firefly luciferase (fLuc) were utilized in all experiments. Firefly luciferase detection is the most sensitive method of monitoring tumor growth and progression (reference); this is particularly important in preclinical testing of therapies which involve stimulating an immune response since swelling associated with inflammation often results in “pseudoprogression” and makes response to therapy difficult to evaluate. Fluorescent protein expression enhances sensitivity of detection of metastases at necropsy and also allows for fluorescent microscopy of tumors. B16F10-fLuc-eGFP murine melanoma cells were maintained under sterile conditions at 37° C. with 5% CO₂ and propagated as adherent monolayers in T75 flasks containing Dulbecco's Modified Eagle Medium (DMEM) supplemented with 10% filtered, heat inactivated fetal bovine serum (FBS) and 100 ug/ml Primocin. Prior to use, cells were trypsinized, centrifuged, counted using a hemocytometer, and resuspended to the desired concentration in sterile phosphate-buffered saline. Trypan blue exclusion was performed to evaluate cell viability during counting; cell viability was at least 90% for all experiments.

### Human Nectin-1 Stable Transfection

[0131] In order to confirm that the lack of cytolysis was due to an entry receptor deficiency in B16F10 cells and not a defect in another segment of the replication cycle, we created a stably transfected B16F10-eGFP-fLuc cell line expressing human nectin-1 using an SV40 lentiviral particle packaged vector under the control of a CMV promoter; nectin-1 is tagged with the red fluorescent protein mCherry at the C-terminus.

### In Vitro Growth Curve B16F10 and B16F10-fLuc-eGFP.

[0132] Prior to engraftment in mice, in vitro growth was evaluated to compare inherent proliferative capacity of B16F10-eGFP-fLuc cells to the parent B16F10 cell line. Cells were seeded at a density of 20,000/well in three 6-well plates. Cells from three wells were collected and counted using a hemocytometer once every 24 hours for 5 days. A growth curve was similarly generated to compare B16F10-fLuc-eGFP and B16F10-fLuc-eGFP-nectin-1 but the initial seeding cell density was 50,000 cells/well.

### VC2 Viral Stock Preparation

[0133] VC2 stocks were prepared in baby hamster kidney (BHK) cells. T-150 flasks inoculated with virus were maintained under sterile conditions at 37° C. with 5% CO₂ for 24-48 hours until cells were rounded up but still adherent. Cells were scraped using a cell scraper and flask contents including cells and spent media were poured into 50 ml tubes. Tubes were centrifuged at, supernatant decanted, pellet submerged in liquid nitrogen until frozen, thawed in a 36 degree? warm water bath, and resuspended in 2 ml of supernatant. Centrifuge and freeze-thaw cycles were repeated 2 more times to free intracellular virions. The pellet was discarded, and the viral stock solution was ultracentrifuged using at 27,000 RPM for 2 hours until a viral pellet was visible. Viral pellet was resuspended in 1 ml of sterile PBS. Concentrated viral stock was titrated on African green monkey kidney (vero) cells; concentration was determined to be 10⁹ plaque forming units (PFU)/ml. Stock was aliquoted into individual doses of 10⁶ PFU in 100 ul of PBS in Eppendorf tubes and stored at −80 degrees.

### Tumor Induction and Monitoring

[0134] Twenty, 6-8-week-old, female C57BL/6J mice were anesthetized with 2-3% isoflurane and engrafted with 600,000 B16F10-fLuc-eGFP cells suspended in 100 μL of sterile PBS intradermally in the left pinna with a 27-gauge needle on a 1 mL syringe after disinfection with 70% isopropyl alcohol. Tumors were imaged using a Spectra Ami In Vivo Imaging System (IVIS) 10 minutes after intraperitoneal injection of 100 ul of d-luciferin potassium (Biogold) in the week before, during, and after treatment. Tumors were additionally measured every other day using digital microcalipers; volumes were calculated using the formula for an ellipsoid (V=(n/6)×L×W×H). Mice were euthanized when tumors averaged 500 mm³. Tumor specific growth rates (SGR) were calculated as the percent change in tumor volume per day from two measured time points (SGR=ln(V₂/V₁)/(t₂−t₁)). At necropsy, tumors were removed with the pinna and weighed using a digital gram scale.

[0135] Tumor volumes were compared statistically between the control and treatment groups at the time treatment was initiated and at the time of euthanasia for experimental validation; there was no significant difference in tumor volumes or variance in the control and treatment groups at the time treatment or mock-treatment was initiated (student's t test, unpaired, two-tailed P=0.6457; F test, P=0.4727) or at the time of euthanasia (student's t test, unpaired, two-tailed P=0.2781; F test, P=0.4010).

### Intratumoral Injections

[0136] Intratumoral injection is currently considered the most reliable method to deliver oncolytic HSV-1 (Sanchala et al. (2017) Front. Pharmacol. 8:270; Shintani et al. (2011) Virol. J. 8:446). A major challenge to utilizing HSV-1 in oncolytic virotherapy, however, is infection efficiency of tumor cells. Id. Strategies to improve intratumoral viral spread have so far included injecting multiple tumors or injection a single tumor in multiple sites; it is advised that doses be given as 3-5 injections or, when given as a single injection, that the volume compose 10-100% of the tumor volume (Sanchala et al. (2017) Front. Pharmacol. 8:270; U.S. Pat. App. Pub. No. 2002/0061298 A1). For this reason, we chose to deliver VC2 in up to 4 doses of 10⁶ PFU in volumes of 100 ul when tumors averaged 100 mm³.

### Histopathology

[0137] Tumors and additional tissues (liver, spleen, lung, kidney, brain, thymus) were fixed in 10% neutral buffered formalin, paraffin embedded, sectioned at 4 μm with a microtome, mounted on glass slides, and stained routinely with hematoxylin and eosino (H&E). Slides were evaluated by a board-certified veterinary pathologist.

### Digital Image Analysis of Oncolysis

[0138] Whole slides containing H&E-stained sections of tumor were digitally scanned using a Hamamatsu Nanozoomer slide scanner. To objectively evaluate and compare the amount of tumor lysis in VC2-treated and control tumors, Nanozoomer viewing software was used to measure the area (mm²) of tumor and the area of necrosis and results were expressed as % necrosis within histologic section (necrosis mm²/tumor mm²×100%). Measurements were made at 1× magnification.

### Immunohistochemistry and Semiquantification

[0139] Ki-67 proliferation index. Immunohistochemistry for Ki-67 was performed to compare the percentage of cells actively cycling in VC2-treated and mock-treated groups and a Ki-67 proliferation index was determined. Within a 40× high power field, 100 cells were designated as either positive or negative for nuclear immunoreactivity for Ki-67; counting was done using digitally scanned virtual slides and cells were marked with a circle when counted so as not to count any cell more than once in the analysis. Ki-67 proliferation index was expressed as a percentage of positive cells (number of positive cells/100×100%).

[0140] Immune infiltration. Immunohistochemistry was performed for immunophenotyping of immune cell infiltrates in the TME. Specifically, staining was performed for CD3 (pan-T cell marker) and IBA-1 (pan-macrophage marker). Because of the prominence of macrophages in the tumor microenvironment, additional characterization included staining for arginase-1, a marker of the M2 phenotype. Slides were evaluated by a board-certified veterinary pathologist and semiquantification was performed; areas of infiltration at the tumor-stroma interface were evaluated and immunoreactive cells were counted in ten 40× high power fields and recorded.

[0141] Microvasular density (NVD). Immunohistochemistry for CD31 was performed to highlight vascular profiles within the tumor. MVD was determined by counting vascular profiles in a 20× field (Weidner's method).

### Safety Assessments

[0142] Mice were observed and body weight recorded daily. Body temperature was also assessed daily using IPT-300 temperature sensing transponders implanted subcutaneously in the subcutis of the interscapular area. Necropsy was performed and vital organs (liver, spleen, lung, kidneys) weighed. Tissues were collected, fixed in 10% neutral buffered formalin, processed routinely, paraffin-embedded, sectioned at 4 μm with a microtome, and stained with hematoxylin and eosin (H&E).

### Results

### B16F10-fLuc-eGFP and B16F10-fLuc-eGFP-Nectin-1 Melanoma Model Development

[0143] In vitro growth curve B16F10 and B16F10-fLuc-eGFP. Prior to engraftment in mice, in vitro growth was evaluated to compare proliferative capacity of B16F10-eGFP-fLuc cells to the parent B16F10 cell line. Cells were seeded at a density of 20,000/well in three 6-well plates. Cells from three wells were collected and counted using a hemocytometer once every 24 hours for 5 days. There was no significant difference in growth between B16F10-eGFP-fLuc cells and the B16F10 parent line (FIG. 7). Growth pattern best fit an exponential growth curve for both B16F10 (R²=0.7687) and B16F10-fLuc-eGFP (R²=0.9645) and doubling times were 1.165 and 0.7732 days, respectively.

[0144] In Vitro Luciferase Assay. B16F10-fLuc-eGFP cells were titrated on a 96-well plate and evaluated using the Spectra Ami imaging system within 10 minutes of applying luciferin substrate. There was strong correlation between the number of cells inoculated per well and photon emission in vitro (FIG. 8) (Pearson r=0.9966; P<0.0001****).

[0145] In Vivo Luciferase Assay. In order to determine whether luciferase expression correlated with cell number in vivo, mice were engrafted with 2×10⁵ or 6×10⁵ cells in each pinna (FIG. 9). Mice were imaged within an hour of engraftment approximately 10 minutes after intraperitoneal administration of luciferin. Significant correlation between the number of cells engrafted and bioluminescence was detected (Pearson r=0.5268; P=0.0007***). Engraftment technique was evaluated statistically using an unpaired, two-tailed student's t test. As would be expected, photon emission was significantly higher in mice engrafted with 6×10⁵ cells versus 2×10⁵ cells (P=0.0007***); however, variance in photon emission was also significantly higher in mice engrafted with 6×10⁵ cells (P<0.0001****).

[0146] In Vivo Enhanced Green Fluorescent Protein (eGFP) Expression. B16F10-fLuc-eGFP melanoma tumors expressed eGFP in vivo. Fluorescence microscopy aids in detection of micrometastases in the sentinel lymph nodes at postmortem examination. Expression of fluorescent proteins is the only technique to achieve single cell resolution in a whole tumor ex vivo or using intravital microscopy.

[0147] Stable transfection of B16F10-fLuc-eGFP murine melanoma cells with human nectin-1. B16F10 murine melanoma cells have typically been regarded as non-permissible to HSV-1 infection. However, after in vitro infection with VC2, virus can be detected in the cytoplasm via immunofluorescent microscopy, but significant cytolysis was not observed (not shown). In cells which lack entry receptors, HSV-1 enters via atypical endocytosis/phagocytosis but replication may not occur. Nectin-1 receptor expression has been shown to be a marker of sensitivity to oncolytic herpesvirus treatment in another common skin cancer, squamous cell carcinoma. In order to evaluate whether lack of cytolysis was due to an entry receptor deficiency in B16F10 cells, we created a stably transfected B16F10-fLuc-eGFP cell line with human nectin-1; nectin-1 was tagged with the red fluorescent protein mCherry fused to the C-terminus to create the B16F10-fLuc-eGFP-nectin-1 line. Transfected cells strongly, diffusely expressed red fluorescent protein on the plasma membrane and emitted a yellow color after merging due to co-localization with the eGFP expressing cell line (not shown).

[0148] In Vitro Growth Curve B16F10-fLuc-eGFP and B16F10-fLuc-eGFP-nectin-1. We evaluated in vitro growth of the nectin-1 expressing line in comparison to the parental line, B16F10-fLuc-eGFP (FIG. 10). There was no significant difference between cell lines at any time point over the course of five days. The B16F10-fLuc-eGFP and B16F10-fLuc-eGFP-nectin-1 cell lines had doubling times of 1.544 and 1.839 days, respectively. An exponential growth curve fit both B16F10-fLuc-eGFP (R²=0.9129) and B16F10-fLuc-eGFP-nectin-1 (R²=0.8685) cell lines.

[0149] In vitro VC2 infections in B16F10-fLuc-eGFP and B16F10-fLuc-eGFP-nectin-1 cells. B16F10-fLuc-eGFP-nectin-1 cells were infected with VC2 at an MOI of 0.001, 0.01, 0.1, and 1.0 and cells were examined using fluorescent microscopy prior to trypsinization and counting of live cells using trypan blue exclusion assay once every 24 hours for 3 days post infection (FIGS. 11A-11C). There was no significant growth inhibition of B16F10-fLuc-eGFP-nectin-1 cells at 24 and 48 hours at any MOI evaluated in comparison to mock-infected cells. At 72 hours, there was no difference between MOI 0.001 and mock-infected cells, but there was significant decrease in live cells at MOI 0.1 (P=0.0119*) and 1.0 (P=0.0158*); cells infected with an MOI of 0.01 approached significant growth inhibition (P=0.0668). In comparison, B16F10-fLuc-eGFP cells were not significantly decreased at any time point over the full 72 hours at an MOI of 0.01, 0.1, or 1.0 in comparison to mock-treated control wells. Cytolytic effect was increased in nectin-1 receptor containing cells in a dose and time-dependent manner.

[0150] Bioluminescence cytotoxicity assay. The ability to detect cell death related to VC2 infection via bioluminescence was assessed. Cells were infected at an MOI of 0.1, 1.0, 10, and 100. Results of the bioluminescence cytotoxicity assay were similar to that found from trypan blue exclusion assay (FIG. 12). Significant cytotoxicity and reduction of bioluminescent signal was not observed with VC2 infection of B16F10-fLuc-eGFP except at MOI 100, but cell viability and bioluminescence were significantly decreased when B16F10-fLuc-eGFP cells expressing human nectin-1 were infected.

[0151] VC2 replication in B16F10-fLuc-eGFP versus B16F10-fLuc-eGFP-nectin-1. Additionally, VC2 grew to higher titers in B16F10-fLuc-eGFP-nectin-1 cells than in the B16F10-fLuc-eGFP cells lacking nectin-1 expression (FIG. 13).

[0152] In Vivo B16F10-fLuc-eGFP and B16F10-fLuc-eGFP-nectin-1 Engraftment Efficiency. Engraftment rate was evaluated using a cell density inoculum of 2×10⁵ cells and 6×10⁵ cells. When mice were engrafted with the higher cell density, ⅘ or 80% developed a macroscopic tumor (not shown), while only ⅗ or 60% developed a tumor when engrafted with 2×10⁵ cells (not shown). B16F10-fLuc-eGFP cells expressing human nectin-1 formed tumors in immunocompetent mice; however engraftment efficiency was reduced in comparison to the nectin-1-negative cell line when 6×10⁵ were similarly engrafted in the pinna with only ⅗ or 60% of animals forming a macroscopic tumor within a two to three week time frame. Nectin-1 expression was observed within tumors via fluorescent microscopy demonstrating red fluorescence. Nectin-1 receptors also appeared to be functional within tumors since immunohistochemical staining for HSV-1 showed strong immunoreactivity in necrotic areas at 72 hours post-infection. Nectin-1-expressing tumors had extensive areas of intratumoral necrosis in comparison with nectin-1 negative tumors even in uninfected controls. Comparison of necrosis in VC2 treated nectin-1 positive and nectin-1 negative cells after infection is therefore not possible due to the phenotype difference induced by nectin-1 expression.

[0153] To summarize our findings during development of the B16F10-fLuc-eGFP/nectin-1 syngeneic murine melanoma model, we found that expression of luciferase and enhanced green fluorescent protein had no effect on tumor cell growth in comparison to the parental B16F10 cell line in vitro. Further, stable transfection of the human nectin-1 receptor also had no negative impact on in vitro cell tumor cell growth. We showed that bioluminescence correlates with cell number in vitro and in vivo after engraftment in mice. We determined that nectin-1 expression is an important factor in tumor cell lysis in the B16F10-fLuc-eGFP murine melanoma cell line in response to VC2 infection in vitro and that lysis occurs in a dose-dependent manner. In vivo, we found that B16F10-fLuc-eGFP cells express the luciferase and eGFP reporter genes well and form tumors in immunocompetent mice with acceptable tumor induction rates; B16F10-fLuc-eGFP-nectin-1 cells also form tumors but with reduced engraftment efficiency. B16F10-fLuc-eGFP-nectin-1 tumors express nectin-1 receptors in vivo which are functional for VC2 entry based on immunohistochemical staining for HSV-1 within tumors.

### VC2 Efficacy Assessment in the B16F10-fLuc-eGFP Model.

[0154] During model development, we found that VC2 only resulted in significant cytotoxicity of tumor cells in the presence of nectin-1 receptors in vitro. However, in vitro cytotoxicity testing cannot account for host immune responses and immunogenic cell death, which have been shown to be important in generating effective, durable anti-tumor immune responses. We aimed to test the ability of our model to evaluate therapeutic response to the highly immunogenic VC2 HSV-1 live attenuated vaccine strain administered intratumorally in absence of a direct cytolytic effect. We hypothesized that immunogenicity of the virus alone could have a strong adjuvant effect in stimulating anti-tumor immune responses and have a therapeutic immune-modulating effects in the tumor microenvironment. We also hypothesized that bioluminescence would be more sensitive for detection of therapeutic response than tumor volume in the face of an inflamed tumor microenvironment, an intended effect of immunogenic, immune-modulating VC2 virotherapy. Improved overall survival was the desired endpoint.

[0155] Twenty 8-10-week-old female C57BL/6 mice with B16F10-fLuc-eGFP melanoma tumors on the pinna were divided into two groups, a control group consisting of nine mice and a treatment group consisting of 11 mice. Tumors averaged approximately 100 mm³ when VC2 or mock treatment with PBS was initiated and animals were euthanized when tumors had grown significantly (P=0.0001***) averaging 500 mm³; no significant differences were found in tumor volume between the two groups prior to the initiation of therapy or at the time of postmortem examination.

[0156] Up to four doses of 1×10⁶ PFU of VC2 in 100 ul were administered intratumorally to the treated group within a week's time, while mock-treated mice received the same volume and dosing frequency of PBS. All 20 animals were monitored for tumor growth using measurement with digital microcalipers during the course of treatment to monitor progression of the primary tumor. Four mock-treated control mice and eight VC2-treated mice were also monitored using in vivo imaging to detect tumor bioluminescence during the week of treatment with VC2 virotherapy to assess the utility of bioluminescent imaging to detect acute response to intratumoral virotherapy treatment in comparison to traditional micro-caliper measurement.

[0157] Prior to initiation of VC2 virotherapy or mock treatment with PBS, there was highly significant correlation between tumor volume and photon emission from tumors during bioluminescent in vivo imaging (Pearson r correlation coefficient=0.8549, P=0.0004***). However, when paired tumor volume and tumor bioluminescence values were compared during the week of treatment, there was reduced correlation in the VC2-treated group (Pearson r correlation coefficient=0.4225; P=0.0354*) in comparison to the mock-treated control group, in which tumor volume and bioluminescence correlated strongly (Pearson r correlation coefficient=0.8258; P=0.0009***) (FIGS. 14A-14B).

[0158] When growth curves were produced and superimposed on each other for individual animals based on tumor volume and tumor bioluminescence, we found that the tumor growth trends generally paralleled each other for the control group, but growth curves frequently showed differing trends in the VC2 treated group depending on whether tumor volume or bioluminescence was assessed (not shown). Tumor bioluminescence was often decreasing in the VC2-treated group despite the appearance of increasing tumor volume. Based on the highly immunogenic nature of the VC2 vaccine, we hypothesized that the discrepancy could be due to acute necrosis and inflammation associated with acute immune response to the virus. We suspected that the immune-stimulating effects in the tumor microenvironment resulted in tumor swelling or “pseudoprogression” rather than true tumor cell proliferation and progression. We therefore aimed to evaluate and compare tumor necrosis and inflammation within the tumor microenvironment in the VC2 and mock-treated control groups.

### Tumor Necrosis (Oncolysis)

[0159] HSV-1 is regarded as having a lytic life cycle, since death of the host cell is the ultimate outcome of productive infection. We aimed to evaluate the amount of tumor lysis we could detect on histopathology from tumors treated with VC2 versus mock-injected tumors. In order to objectively quantify the amount of lysis present, we used digital image analysis to outline and quantify the area (mm²) of the tumor section and the area of necrosis and express the value as percent necrosis within the tissue section We found that there was a trend towards increased tumor lysis in sections from VC2-treated tumors, although differences were not statistically significant (unpaired, two-tailed, student t test; P=0.3890). However, as survival was our endpoint, animals were euthanized at varying time periods based on perceived clinical disease progression. Therefore, we thought it was possible that the amount of necrosis could vary with regard to the amount of time that passed before euthanasia occurred. In the VC2-treated group, larger areas of necrosis were observed when sections of the tumor were examined with more proximity to the time of the last VC2 injection (Pearson r correlation coefficient=−0.7833; P=0.0125*). In order to ensure this correlation was not a mechanical effect resulting from injection, we also evaluated the control group separately and found no significant correlation between the amount of necrosis on histopathology and the time elapsed post-injection of PBS (Pearson r (correlation coefficient)=−0.503; P=0.3073). Although there were no significant differences in size of tumors between the VC2 and mock-treated groups at the time of necropsy, we wanted to rule out the possibility that increased necrosis may be related to the size of the tumor rather than the time elapsed after injection of virus. No correlation was found for size and degree of necrosis for the control (Pearson r (correlation coefficient)=−0.2902; P=0.5769) or VC2-treated groups (Pearson r (correlation coefficient)=−0.05462; P=0.8890). Our interpretation is that increased necrosis/tumor lysis may be more evident at earlier time points after VC2 treatment based on our analysis showing increased tumor necrosis when less time elapsed between VC2 treatment and examination of tumor tissue. We also performed immunohistochemistry for HSV-1 on a tumor that was inoculated with VC2 6 days prior. We found marked cytoplasmic immunoreactivity in the cytoplasm, which was more intense in cells adjacent to areas of intratumoral lysis (not shown). Although VC2 likely replicates in stroma and other cells in the tumor microenvironment more efficiently than the B16F10-fLuc-eGFP tumor cells lacking nectin-1, immunofluorescent staining showed VC2 co-localized to the cytoplasm and cell membrane in some areas of the tumor (not shown).

### Response to VC2 in the Tumor Microenvironment

[0160] We hypothesized that the highly immunogenic VC2 vaccine would stimulate an immune response in the tumor microenvironment. We observed that although there was no statistical difference in tumor volumes at necropsy between VC2 and control groups (P=0.2781), tumor mass at necropsy was increased for VC2 treated animals (P=0.0287). We suspected this increase in tumor mass could be related to increased infiltration by immune cells. We also suspected the previously mentioned discrepancy in correlation between tumor bioluminescence and tumor volume during VC2 treatment could have been the result of increased inflammation in the tumor microenvironment in VC2-treated mice, which resulted in increasing tumor volumes and the clinical perception of tumor progression although bioluminescent imaging suggested tumors were regressing. We therefore aimed to evaluate whether mice treated with VC2 had evidence of enhanced immune responses in the tumor microenvironment compared to mock-treated control mice using immunohistochemistry.

[0161] We found that in VC2-treated mice, macrophages were significantly increased in the tumor microenvironment (unpaired, two-tailed t test; P=0.0033); importantly, we also found that arginase-1 expression, a typical marker of the anti-inflammatory, protumorigenic M2 macrophage phenotype in mice, was decreased (unpaired, two-tailed t test, P=0.0003) in comparison to mock-treated controls. The increase in macrophages was also accompanied by an increase in CD3+ T cells in the tumor microenvironment (unpaired, two-tailed t test; P=0.0458). Infiltration by T cells is a positive prognostic indicator in human patients with melanoma and is frequently observed in biopsies of patients with regressing lesions.

### Microvascular Density

[0162] Although B16F10 cells themselves support only non-productive infection with VC2, other cell types in the tumor microenvironment would be expected to be able to support robust replication including fibroblasts and endothelial cells. B16F10-fLuc-eGFP tumors are markedly vascular, containing tortuous tumor-associated vessels (not shown). We hypothesized that VC2-treated tumors may have reduced vascularity due to destruction via viral replication, destruction via inflammation as a bystander response, or as a result of decreased numbers of M2 macrophages which produce abundant vasculogenic VEGF. Microvascular density was slightly reduced in VC2-treated mice and approached statistical significance (unpaired t test, P=0.0617).

### Overall Survival

[0163] VC2-treated mice trended towards increased survival times in comparison with mock-treated animals. Mice that received VC2 treatment had a median survival time of 15 days, almost twice that of control mice which was 8 days, although the difference in survival was not found to be significant when a Kaplan Meier curve and log-rank test were generated (P=0.153) (FIG. 15); notably, one VC2-treated mouse had a complete response with no sign of disease more than 180 days after treatment.

[0164] Primary tumor growth is the major limiting factor in survival in most transplantable murine tumor models. For this reason, we wanted to evaluate what effect, if any, VC2 had on tumor growth rates. Tumor specific growth rate (SGR) is calculated using tumor volumes over time. Growth rates were evaluated for control and VC2-treated animals the week before treatment, the week during treatment, and the week following treatment using the formula, SGR=ln(V₂/V₁)/(t₂−t₁), which calculates the percent change in tumor volume per day from two measured time points. VC2-treated mice trended towards decreasing growth rates during treatment in comparison to mock-treated controls, but differences between the two groups were not statistically significant (FIG. 16). The reduction in tumor growth rates may be underestimated since the formula is based on tumor volumes rather than bioluminescence which detects responses with greater sensitivity. When overall growth rates were calculated and compared with regard to survival time, we found differences in the impact of overall specific growth rate on overall survival between mock-treated and VC2-treated mice. There was no correlation in growth rate and overall survival in mock-treated mice ((Pearson r (correlation coefficient)=−0.2379; P=0.5705) (FIGS. 17B, 17D), while VC2-treated mice showed a significant, negative correlation ((Pearson r (correlation coefficient)=−0.8159; P=0.0022) (FIGS. 17A, 17C). In the treated group, animals with slower growth rates lived longer. Our interpretation is that mock treatment had no effect on growth rates, and therefore no relationship could be established when evaluated for correlation with survival.

[0165] Response to immune modulating cancer therapies, and oncolytic virotherapy specifically, varies markedly in human patients as previously mentioned. Additionally, high variability in response within treatment groups is typical in immuno-oncology studies involving preclinical testing of immunotherapies in mice in comparison to more traditional pharmacology studies (Li et al. (2017) Pharmacol. Ther. 173:34-46). We therefore desired to identify any factor that could have led to improved responses, i.e. longer survival times, in some animals treated with VC2 as compared to other animals within the treatment group. We found that tumor volume at the time treatment was initiated correlated significantly with overall survival in the VC2 treated group, but not the control group. Although tumor volumes averaged 100 mm³ at the start of treatment, some variation in individual tumor volumes between mice at the time treatment was noted; however, as was demonstrated in FIG. 14B there was no statistical difference in tumor volumes between VC2 and control groups prior to experimental manipulation (unpaired t test, P=0.6457) and variance between the two groups was also insignificant (F test, P=0.4727). Nonetheless, there was a significant, direct, negative correlation between the tumor volume at the start of initiation of treatment and overall survival (Pearson r (correlation coefficient)=−0.6397; P=0.0340) (FIGS. 17A, 17C). Put simply, animals treated with VC2 lived longer when treatment was initiated when the tumors were smaller. This is in concordance with a survey of preclinical immuno-oncology studies which showed that only small tumors typically responded well, and only resulted in delayed tumor growth (Li et al. (2017) Pharmacol. Ther. 173:34-46; Wen et al. (2012) Oncoimmunology 1:172-178). There was no significant correlation between initial tumor volume and survival times for the control group (Pearson r (correlation coefficient)=−0.0559; P=0.8954) (FIGS. 17B, 17D). We wondered if smaller tumors simply grew more slowly and may not be a result of treatment. This was not the case. When we looked for a relationship between tumor size and growth rate, control mice showed no significant correlation (Pearson r (correlation coefficient)=−0.6146; P=0.1049), while there appeared to be a strongly significant relationship between starting tumor size and growth rate in the VC2-treated mice (Pearson r (correlation coefficient)=−0.8772; P=0.0005). Mice that received VC2 treatment had slower overall growth rates than mice that received mock treatment, and slower growth rates correlated significantly with smaller tumors at the time therapy was initiated. Since all animals received a dose of 1×10⁶ PFU per injection, tumors that were slightly smaller, in essence, received a higher dose. The finding that mice treated with tumors which were smaller had reduced tumor growth rates and that those reduced growth rates correlated with longer survival times, suggest that VC2 may reduce tumor growth rates and extend overall survival in a dose-dependent manner even in absence of the entry receptor, nectin-1. We hypothesized that reduced cell cycling could be another mechanism by which VC2 exerts effects in controlling and slowing tumor growth.

### Cell Cycling—Tumor Ki-67 Index.

[0166] Tumor cell proliferation is characteristic of melanoma progression and Ki-67 is a common biomarker used in melanoma and other cancers; Ki-67 index holds independent prognostic value in melanoma patients (Gimotty et al. (2005) J. Clin. Oncol. 23:8048-8056). We evaluated Ki-67 expression to determine if VC2 virotherapy had any effect on cell cycling. Ki-67 is a more sensitive indicator of cell cycling than mitotic index since it is a marker for cells in all stages of the cell cycle, while mitotic index only gives an indication of cells in M phase. Tumors from mice treated with VC2 had markedly significantly reduced Ki-67 expression (P<0.0001) in comparison to mock-treated controls (FIG. 18). This finding suggests that a modulation of the cell cycle may be one mechanism in which VC2 reduces tumor growth rates and prolongs survival in tumor bearing mice.

### Safety

[0167] Safety assessments of mice receiving VC2 virotherapy showed that treatment was well-tolerated. Treated animals maintained their body condition as well or better than mock-treated mice. At the time of postmortem examination, VC2-treated mice weighed more on average although the difference was not significant (P=0.0542) (FIG. 19). Body temperature was monitored via subcutaneously implanted, temperature sensing transponders. No clinically significant pyrexia was observed in treated animals at any time. Vital organs were weighed at postmortem exam and splenomegaly was the only significant abnormality observed in VC2 treated mice (P=0.0388) (FIG. 20); morphometric digital image analysis showed that VC2 treated mice had significant lymphoid hyperplasia in comparison to mock treated controls (P=0.0068) (FIG. 21). Splenomegaly and lymphoid hyperplasia in VC2 treated animals suggests a systemic immune response to virotherapy, although it is undetermined if this response is tumor specific.

### Discussion

[0168] Melanoma is a notoriously difficult cancer to treat in human patients and is resistant to most traditional cancer therapies including chemotherapy and radiation. Novel therapies which stimulate anti-tumor immune responses have shown promise, including oncolytic virotherapy; however, preclinical testing in murine tumor models have often not been predictive of response in human patients. Response to the FDA-approved oncolytic herpesvirus T-VEC has shown limited efficacy in a subset of patients in clinical trials despite robust responses in mice and some human patients have experienced adverse effects. The mechanisms of variability in response are not well-understood. We aimed to create a murine melanoma model for testing immune-modulating therapeutic effects of novel, genetically engineered herpesviruses.

[0169] In our early work, we observed poor infection efficiency of B16F10-fLuc-eGFP murine melanoma cells with oncolytic herpesviruses and poor sensitivity to cell killing although VC2 could be detected in the cytoplasm of B16F10-fLuc-eGFP cells at 12 hours via immunofluorescent microscopy. We hypothesized that decreased in vitro sensitivity to HSV-1 mutants may be related to lack of nectin-1 receptors which have been shown to be predictive of oncolytic HSV-1 sensitivity in a murine squamous cell carcinoma model. We therefore created a stably transfected murine melanoma cell line expressing human nectin-1 and demonstrated improved viral replication and cytolysis in vitro.

[0170] The detection of virus in the cytoplasm B16F10-fLuc-eGFP cells after in vitro infection but lack of significant cytopathic effect suggests the virus may enter but not replicate and lyse the tumor cells in absence of nectin-1. Cells may become infected with HSV-1 through gD receptor binding to HVEM, nectin-1, or 3-O-sulfate HS and fusion or via receptor independent atypical endocytosis/phagocytosis. When entry receptors are present, virions may enter via fusion or endocytosis. However, when appropriate receptors are not present, HSV-1 must enter via endocytosis only and occurs rapidly. In fact, it has been shown that Chinese hamster ovary cells (CHO), which are known to lack HSV-1 entry receptors and are widely considered to be non-permissible, are able to be efficiently infected with HSV-1 at a rate similar to vero cells and CHO cells transduced to express nectin-1 (Nicola & Straus (2004) J. Virol. 78:7508-7517). Therefore, entry via the endocytic pathway appears to be independent of viral entry receptor expression. However, infection of cells lacking entry receptors via the endocytic pathway does not result in a productive infection and release of infectious viral progeny. Id. Infection of such cells is considered to be non-productive since infectious progeny are not produced and enveloped virions are degraded via fusion of the endocytic membrane with lysosome.

[0171] While this would markedly limit the spread and pathogenicity of a virus in tumor cells lacking entry receptors in vitro, the complexity of the tumor microenvironment (TME) would include a host of cells which may better support productive infection such as cancer associated fibroblasts (CAF), immune cells, and endothelial cells of tumor-associated vasculature. These cell-types, and others in the TME, supply a replication niche for virus to persist and allow waves of infection of even poorly permissible tumor cells lacking entry receptors via endocytosis. Productive infection in stroma and tumor-associated vasculature could have multiple direct and indirect therapeutic anti-tumor benefits. Induction of ICD associated with efficient viral replication in these cells may release DAMPs such as ATP and HMGB1 to enhance the innate immune response in the tumor microenvironment. On the other hand, direct effects could include directly eliminating a portion of cancer-associated fibroblasts (CAF) and disrupting tumor-associated vasculature, creating a microenvironment that is less supportive of tumor growth. The ability of a live attenuated virus to create a replication niche in the tumor microenvironment and amplify its presence and effect through replication could decrease the need for frequent injections by supplying a continuous supply of virus for infection of tumor cells. We detected intratumoral VC2 at 6 days post infection in association with necrotic areas despite the lack of nectin-1 receptors. Even in the absence of direct lysis in the B16F10-fLuc-eGFP cell line lacking nectin-1, cell death may still occur via immunogenic cell death secondary to indirect ER stress, a factor impossible to account for in vitro.

[0172] Another factor impossible to account for in vitro is host immune response. Some studies have shown that rapid infection and spread in vitro predicts better in vivo response; however, such studies have been performed in xenogenic models and therefore do not account for immune responses (Wollmann et al. (2005) J. Virol. 79:6005-6022; Bennett et al. (2002) Cancer Gene Ther. 9:935-945). Some would argue that spread, persistence and continued replication within the tumor and/or microenvironment are less important than immunogenicity of the virus and immune response in the early stages of viral infection. In fact, it has been reported that, regarding oncolytic HSV, in vitro cytotoxicity and viral persistence in vivo do not correlate with anti-tumor efficacy. It has instead been shown that expression of markers of immunogenic cell death, such as heat shock protein 70 and elevated levels of serum high mobility group box 1 (HMGB1), increased antigen presenting cells, and CD8+ T cell responses may be more likely associated with HSV-associated therapeutic benefits (Workenhe et al. (2014) Mol. Ther. 22:123-131).

[0173] We therefore aimed to test the ability of the highly immunogenic HSV-1 live attenuated vaccine strain, VC2, in stimulating a therapeutic immune response against melanoma tumors in mice. In comparison to cancer drug discovery that focuses cytotoxic and/or targeted approaches, relevant models for immuno-oncology approaches are more limited and are urgently needed (Li et al. (2017) Pharmacol. Ther. 173:34-46). Models are specifically needed which can answer questions regarding why only certain subsets of patients respond, how to predict responders, and how to extend or improve responses in resistant or only partially responsive patients. Id. Syngeneic murine tumor models are commonly used in preclinical immuno-oncology studies but there are many challenges including a short window for evaluating response before tumors ulcerate or reach a size requiring euthanasia based on IACUC standards. Id. We utilized B16F10-fLuc-eGFP murine melanoma cells lacking nectin-1 receptors in order to demonstrate the immunogenicity of the virus alone in absence of robust replication and direct lysis and destruction of tumor cells. We additionally demonstrated that monitoring bioluminescence improved sensitivity in detecting acute responses to virotherapy over traditional microcaliper measurement. Mice may be prematurely euthanized when clinical assessment of tumor progression is based on tumor volume alone since immune-stimulating therapies result in acute necrosis, inflammation, and swelling of the tumor, a phenomenon referred to as pseudoprogression. More sensitive evaluation of response to therapy should improve development of effective therapeutic strategies since acute responses will be more apparent and direct dosing strategies in subsequent studies. We hypothesized that the discrepancy between correlation of tumor volumes and tumor bioluminescence during VC2 treatment could indeed be related to acute necrosis and inflammation during the early stages of virotherapy. In the VC2-treated group, larger areas of necrosis were observed when sections of the tumor were examined when less time had elapsed since the last VC2 injection. Early responses may be undetected or underestimated since necrosis may be a more prominent histologic change in the early stages of VC2 virotherapy and differences in virus-treated and control groups may be less apparent when tumors are examined at later time points.

[0174] There are a number of pathways that the cell can utilize to trigger death and result in tumor lysis in response to HSV-1 infection including apoptosis and necroptosis, and the mechanism of cell death has an influence on the immune response. Cancer cells may have mutations that make these cell death pathways ineffective. Further, HSV-1 has evolved mechanisms of evading these pathways in order to keep the cell alive to buy time for replication. However, even if these pathways are initially skirted by the virus, cells will ultimately still die as a result of ER stress either directly or indirectly, in a process referred to as immunogenic cell death. Immunogenic cell death is recognized as an important factor in eliciting antitumor immune responses through traditional cancer therapies such as chemotherapy and radiation as well as oncolytic virotherapy using HSV-1-based viruses.

[0175] Cell death may also occur even in a nonproductive infection, related to ICP0 expression by HSV-1, which is a tegument protein referred to as an “apoptoxin”. ICP0 can activate caspase-3 and trigger apoptosis without the need for viral replication to occur; it is possible that at a high enough dose of virus, significant amounts of ICP0 may be able to induce apoptosis even in absence of replication in cells that do not support productive infection. However, in cells that permit viral replication, transcription of early and late genes may inhibit apoptotic pathways; this extends the life of the cell to allow time for replication. When HSV-1 is successful in preventing apoptosis, necroptosis is another pathway by which the cell can trigger its own death to limit viral spread and replication (Yu & He (2016) Virol. J. 13:77). In humans, HSV-1 has evolved mechanisms to also evade this pathway of cell death. R1 prevents necroptosis in human cells, but not in mouse cells, where RIP3 is efficiently activated by ICP6 after HSV-1 infection in a manner independent of TNFR, TLR3, or DAI (Wang et al. (2014) PNAS 111:15438-15443; Huang et al. (2015) Cell Host Microbe 17:229-242). This is one factor responsible for limiting viral replication in mouse cells in general, a non-natural host. Therefore, it is expected that in permissive human cells infected with wild-type HSV-1, virus would replicate to much higher titers than in mouse cells. Further, the outcome of the infection and mechanism of cell death may be different based on dose of virus, species, and cell type. This is important to keep in mind when performing preclinical mouse studies where a wide variety of tumor modeling strategies and tumor cell types are used. Since B16F10 murine melanoma cells do not support productive infections with HSV-1, direct cytotoxicity is likely minimal at the doses of VC2 we used in our in vivo experiments, although some apoptosis secondary to ICP0 is possible. Necroptosis is unlikely to occur to much degree since ICP6 is involved in triggering this pathway in HSV-1 infections and requires initiation of replication in order to be expressed. Type I immunogenic cell death is considered likely to be a predominating mechanism of cell death in tumor cells lacking entry receptors required for efficient replication in oncolytic HSV-1 virotherapy.

[0176] Effective anti-tumor immune responses require functional innate and adaptive systems. The initial step in mounting adaptive immunity is efficient recognition and presentation of antigens by antigen presenting cells of the innate immune system including macrophages and dendritic cells. M1 type macrophages, or “classically activated” macrophages are effective at antigen presentation, produce pro-inflammatory cytokines, and have anti-tumorigenic effects overall. M2 type or “alternatively activated” macrophages are ineffective antigen-presenters, produce immunosuppressive cytokines, and play many roles in supporting tumor growth and progression. We detected reduced expression of arginase-1 by macrophages, a canonical marker of the M2 phenotype in mice, in the TME of VC2-treated tumors although macrophages overall were generally increased suggesting repolarization to an M1 phenotype. We also detected increased numbers of CD3+ T cells in the TME in VC2-treated mice. T cells are important in generating adaptive anti-tumor immunity and have been observed in the TME of regressing tumors in human melanoma patients.

[0177] In addition to increased tumor lysis and inflammation associated with VC2 treatment, we also found reduced Ki-67 expression in VC2-treated tumors indicating a lower proportion of cells actively proliferating in the cell cycle. Evidence suggests that HSV-1 has evolved a complex and sophisticated ability to modulate the cell cycle in order to infect and replicate (Flemington (2001) J. Virol. 75:4475-4481). Soon after entry, HSV-1 is known to elicit a cell cycle block to limit host protein production in order to use cellular machinery for early stages of viral replication; subsequently, HSV-1 reverses the cell cycle block through expression of late gene γ34.5 in order to replicate with maximum efficiency. Since HSV-1 can enter cells lacking entry receptors through endocytosis, we hypothesized that VC2 entry of B16F10-fLuc-eGFP may elicit cell cycle block, since this effect is known to occur without replication even in the presence of non-replicating HSV-1 L particles. The finding that Ki-67 proliferation index was significantly decreased in VC2-treated tumors was compatible with our hypothesis that VC2 may initiate a cell-cycle block as one mechanism of slowing tumor growth.

[0178] In summary, we have developed an immunocompetent murine melanoma model for testing oncolytic and immunomodulatory HSV-1 viruses. We demonstrated utility of the model in assessing response to therapy with increased sensitivity using bioluminescent imaging. We demonstrated strong immune responses in the tumor microenvironment in VC2-treated mice. The apparent remarkable immunogenicity of VC2 makes it a promising candidate for further development as a viral vector for immune modulating cancer therapy. Studies are underway to further evaluate efficacy and safety in the model and develop the ideal dosing and/or combinatorial drug strategies in preparation for clinical trials.

### Example 3

### VC2 for the Treatment of Melanoma

[0179] Melanoma is the most aggressive and lethal malignancy of the skin and accounts for 90% of skin cancer-related deaths. The most common site for first metastasis is sentinel lymph nodes (SLN). Subsequently, disease spreads to the liver, lungs, and brain in patients with stage IV melanoma. Treatment options for metastatic melanoma in people is severely limited. Greater than 90% of cancer deaths overall are related to metastatic disease.

[0180] Melanoma is considered to be an immunogenic tumor type. Occasionally, regressing melanoma lesions have been associated with infiltration of T cells which have been shown to recognize autologous melanoma antigens in human patients. Circulating antibodies to melanoma antigens have also been detected in the serum of patients. These observations have spurred interest in development of immunotherapies for the treatment of metastatic melanoma. Oncolytic virotherapy, has been widely investigated for oncolytic and immunomodulating effects. The first ever oncolytic virotherapy to receive FDA-approval is an HSV-1-based virus (Talimogene Laherperavec (T-Vec) or Imlygic) containing a transgene for human GM-CSF to enhance an anti-tumor immune response after intratumoral injection. Durable response rate in human patients was only 16% despite impressive efficacy in anti-tumor effects in vitro and in murine tumor models. Novel viruses with enhanced immune-stimulating properties and improved efficacy and safety profiles are needed. Further, the lack of concordance of preclinical murine studies with results in human clinical trials highlights the need for improved murine tumor modeling strategies for testing oncolytic and immune-modulating viruses for anti-tumor effects.

[0181] The development of a live-attenuated HSV-1 vaccine, VC2, which has shown efficacy in protection against lethal HSV-1 and HSV-2 challenge after a single intramuscular injection has been previously reported (see WO 2015/172033). VC2 has a deletion in gK which prevents entry into ganglionic axons but replicates efficiently in permissive cells. Further, VC2 is highly immunogenic generating strong cell-mediated and humoral immune responses.

[0182] An immunocompetent double-labeled murine melanoma model for testing the immune-modulating and adjuvant effects of oncolytic herpesviruses was developed (see Example 2). Intratumoral virotherapy using VC2 resulted in significant reduction in Ki-67 proliferation indices in comparison to mock treated controls. Further, there were significant increases in CD3+ T cells and IBA-1+ macrophages in the tumor microenvironment, but reduced expression of arginase-1, a marker of the M2, pro-tumorigenic macrophage phenotype in mice. Median survival times (MST) of VC2 treated mice were nearly twice that of mock-treated controls and one out of eleven VC2-treated mice had a complete response with no evidence of disease at greater than 180 days. The utility of bioluminescence in monitoring primary tumor growth during efficacy testing of immune-stimulating therapy with VC2 was evaluated, and it is was found that bioluminescence allows for more sensitive assessment of anti-tumor responses during the acute inflammatory phase of treatment during which pseudo-progression can result in misleading increases in tumor volumes using traditional microcaliper measurements. These findings suggest that the remarkable immunogenicity of VC2 makes it a good candidate as a vector for tumor vaccine development and our immunocompetent bioluminescent model allows for sensitive assessment of response to therapy in the face of marked acute inflammation and pseudo-progression. These findings represent significant progress in viral vector development for cancer therapy and significant improvement in modeling strategies that aim to test immune-stimulating anti-cancer therapies in immuno-oncology studies.

[0183] The article “a” and “an” are used herein to refer to one or more than one (i.e., to at least one) of the grammatical object of the article. By way of example, “an element” means one or more element.

[0184] Throughout the specification the word “comprising,” or variations such as “comprises” or “comprising,” will be understood to imply the inclusion of a stated element, integer or step, or group of elements, integers or steps, but not the exclusion of any other element, integer or step, or group of elements, integers or steps.

[0185] All publications and patent applications mentioned in the specification are indicative of the level of those skilled in the art to which this invention pertains. All publications and patent applications are herein incorporated by reference to the same extent as if each individual publication or patent application was specifically and individually indicated to be incorporated by reference.

[0186] Although the foregoing invention has been described in some detail by way of illustration and example for purposes of clarity of understanding, it will be obvious that certain changes and modifications may be practiced within the scope of the appended claims.

The application's sequence listing, which the Patent Office published only in electronic form, follows.

SEQUENCE LISTING (34 sequences)

SEQ ID NO: 1 - DNA, 151968 bp, Artificial sequence
  synthetic sequence
agcccgggccccccgcgggcggggcggcgcgcaaaaaaggcgggcggcggtccgggcggcgtgcgcgcgcgcggcgggcgttggggagcggggggaggagcggggggaggagcggggggaggagcggggggaggagcggggggaggagcggggggaggagcggggggaggagcggggggaggagcggggggaggagcggggggaggagcggggggaggagcggggggaggagcggggggaggagcggggggaggagcggggggaggagcggggggaggagcggggggaggagcggggggaggagcggaaaacgggccccccccgaaacacaccccccgggggtcgcgcgcggccctttaaagcgcggcggcgcagcccgggccccccgcggccgagacgagcgagttagacaggcaagcactactcgcctctgcacgcacatgcttgcctgtcaaactctaccaccccggcacgctctctgtctccatggcccgccgccgccgccatcgcggcccccgccgcccccggccgcccgggcccacgggcgccgtcccaaccgcacagtcccaggtaacctccacgcccaactcggaacccgcggtcaggagcgcgcccgcggccgccccgccgccgccccccgccagtgggcccccgccttcttgttcgctgctgctgcgccagtggctccacgttcccgagtccgcgtccgacgacgacgatgacgacgactggccggacagccccccgcccgagccggcgccagaggcccggcccaccgccgccgccccccgcccccggtccccaccgcccggcgcgggcccggggggcggggctaacccctcccaccccccctcacgccccttccgccttccgccgcgcctcgccctccgcctgcgcgtcaccgcagagcacctggcgcgcctgcgcctgcgacgcgcgggcggggagggggcgccggagccccccgcgacccccgcgacccccgcgacccccgcgacccccgcgacccccgcgcgggtgcgcttctcgccccacgtccgggtgcgccacctggtggtctgggcctcggccgcccgcctggcgcgccgcggctcgtgggcccgcgagcgggccgaccgggctcggttccggcgccgggtggcggaggccgaggcggtcatcgggccgtgcctggggcccgaggcccgtgcccgggccctggcccgcggagccggcccggcgaactcggtctaacgttacacccgaggcggcctgggtcttccgcggagctcccgggagctccgcaccaagccgctctccggagagacgatggcaggagccgcgcatatatacgctgggagccggcccgcccccgaggcgggcccgccctcggagggcgggactggccaatcggcggccgccagcgcggcggggcccggccaaccagcgtccgccgagtcttcggggcccggcccactgggcgggagttaccgcccagtgggccgggccgcccacttcccggtatggtaattaaaaacttacaagaggccttgttccgcttcccggtatggtaattagaaactcattaatgggcggccccggccgcccttcccgcttccggcaattcccgcggcccttaatgggcaaccccggtattccccgcctcccgcgccgcgcgtaaccactcccctggggttccgggttatgctaattgcttttttggcggaacacacggcccctcgcgcattggcccgcgggtcgctcaatgaacccgcattggtcccctggggttccgggtatggtaatgagtttcttcgggaaggcgggaagccccggggcaccgacgcaggccaagcccctgttgcgtcggtgggaggggcatgctaatggggttctttgggggacaccgggttggtcccccaaatcgggggccgggccgtgcatgctaatgatattctttgggggcgccgggttggtccccggggacggggccgccccgcggtgggcctgcctcccctgggacgcgcggccattgggggaatcgtcactgccgcccctttggggaggggaaaggcgtggggtataagttagccctggcccgacagtctggtcgcatttgcacctcggcactcggagcgagacgcagcagccaggcagactcgggccgccccctctccgcatcaccacagaagccccgcctacgttgcgacccccagggaccctccgtccgcgaccctccaaccgcatacgacccccatggagccccgccccggagcgagtacccgccggcctgagggccgcccccagcgcgaggtgaggggccgggcgccatgtctggggcgccatattggggggcgccatattggggggcgccatgttgggggacccccgacccttacactggaaccggccgccatgttgggggacccccactcatacacgggagccgggcgccatgttagggggcgtggaaccccgtgacactatatatacagggaccgggggcgccatgttagggggcgcggaaccccctgaccctatatatacagggaccggggtcgccctgttgggggtcgccatgtgaccccctgactttatatatacagaccccccaacacatacacatggcccctttgactcagacgcagggcccggggtcgccgtgggaccccctgactcatacacagagacacgcccccacaacaaacacacagggaccggggtcgccgtgttagggggcgtggtccccactgactcatacgcagggcccccttactcacacgcatctaggggggtggggaggagccgcccgccatatttgggggacgccgtgggacccccgactccggtgcgtctggagggcgggagaagagggaagaagaggggtcgggatccaaaggacggacccagaccacctttggttgcagacccctttctcccccctcttccgaggccagcaggggggcaggactttgtgaggcggggggggggagagggggaactcgtgggcgctgattgacgcgggaaatccccccattcttacccgcccccctttttttccccttagcccgccccggatgtctgggtgtttccctgcgaccgagacctgccggacagcagcgactctgaggcggagaccgaagtgggggggcggggggacgccgaccaccatgacgacgactccgcctccgaggcggacagcacggacacggaactgttcgagacggggctgctggggccgcagggcgtggatgggggggcggtctcgggggggagccccccccgcgaggaagaccccggcagttgcgggggcgccccccctcgagaggacggggggagcgacgagggcgacgtgtgcgccgtgtgcacggatgagatcgcgccccacctgcgctgcgacaccttcccgtgcatgcaccgcttctgcatcccgtgcatgaaaacctggatgcaattgcgcaacacctgcccgctgtgcaacgccaagctggtgtacctgatagtgggcgtgacgcccagcgggtcgttcagcaccatcccgatcgtgaacgacccccagacccgcatggaggccgaggaggccgtcagggcgggcacggccgtggactttatctggacgggcaatcagcggttcgccccgcggtacctgaccctgggggggcacacggtgagggccctgtcgcccacccaccctgagcccaccacggacgaggatgacgacgacctggacgacggtgaggcgggggggcggcgaggaccctgggggaggaggaggaggaggggggagggaggaataggcgggcgggggggcgaggaaagggcgggcgcggaaagggagggcctgggagggggcgtaacctgatcgcgccccccgttgtctcttgcagcagactacgtaccgcccgccccccgccggacgccccgcgcccccccacgcagaggcgccgccgcgccccccgtgacgggcggggcgtctcacgcagccccccagccggccgcggctcggacagcgcccccctcggcgcccatcgggccacacggcagcagtaacaccaacaccaccaccaacagcagcggcggcggcggcggctcccgccagtcgcgagccgcggcgccgcggggggcgtctggcccctccgggggggttggggttggggttggggttgttgaagcggaggcggggcggccgaggggccggacgggcccccttgtcaacagacccgccccccttgcaaacaacagagaccccatagtgatcagcgactcccccccggcctctccccacaggccccccgcggcgcccatgccaggctccgccccccgccccgggcccaccgcgtcctcggccgcgtcgggacccgcgcgcccccgcgcggccgtggccccgtgcgtgcgagcgccgcctccggggcccggcccccgcgccccggcccccgcggacgcgcgccgtgtgccccagtcgcactcgtccctggctcaggccgcgaaccaagaacagagtctgtgccgggcgcgtgcgacggtggcgcgcggctcgggggggccgggcgtggagggtggacacgggccctcccgcggcgccgccccctccggcgcccccccgctcccctccgccgcctctgtcgagcaggaggcggcggtgcgtccgaggaagaggcgcgggtcgggccaggaaaacccctccccccagtccacgcgtccccccctcgcgccggcaggggccaagagggcggcgacgcaccccccctccgactcagggccgggggggcgcggccagggtgggcccgggacccccctgacgtcctcggcggcctccgcctcttcctcctctgcctcttcctcctcggccccgactcccgcgggggccgcctcttccgccgccggggccgcgtcctcctccgcttccgcctcctcgggcggggccgtcggtgccctgggagggagacaagaggaaacctccctcggcccccgcgctgcttctgggccgcgggggccgaggaagtgtgcccggaagacgcgccacgcggagacttccggggccgcccccgcgggcggcctcacgcgctacctgcccatctcgggggtctctagcgtggtcgccctgtcgccttacgtgaacaagacgatcacgggggactgcctgcccatcctggacatggagacggggaacatcggggcgtacgtggtcctggtggaccagacgggaaacatggcgacccggctgcgggccgcggtccccggctggagccgccgcaccctgctccccgagaccgcgggtaaccacgtgatgccccccgagtacccgacggcccccgcgtcggagtggaacagcctctggatgacccccgtggggaacatgctgttcgaccagggcaccctagtgggcgccctggacttccgcagcctgcggtctcggcacccgtggtccggggagcagggggcgtcgacccgggacgagggaaaacaataagggacgccccccgtgtttgtggggaggggggggtcgggcgctgggtggtctctggccgcgcccactacaccagccaatccgtgtcggggaggggaaaagtgaaagacacgggcaccacacaccagcgggtctttagtgttggccctaataaaaaactcaggggatttttgctgtctattgggaaataaaggtttacttttgtatcttttccctgtctgtgttggatggatctcgggggtgcgtgggagtgggggtgcgtgggagtgggggtgcgtgggagtgggggtgcgtgggagtgggggtgcgtgggagtgggggtgcgtgggagtgggggtgcgtgggagtgggggtgcgtgggagtgggggtgcgtgggagtgggggtgccatgttgggcaggctctggtgttaaccacagagccgcggcccgggctgcctgaccaccgatccccgaaagcatcctgccactggcatggagccagaaccacagtgggttgggtgtgggtgttaagtttccgcgagcgcctgcccgcccggactgacctggcctctggccgccacaaagggcgggggggggttaactacactatagggcaacaaaggacgggaggggtggcggggcgggacggggcgcccaaaagggggtcggccacaccacagacgtgggtgttggggggtggggcggaggggtggggggggagacagaaacaggaacatagttagaaaacaagaatgcggtgcagccagagaatcacaggagacgaggggatgggcgtgttggttaccaacccacacccaggcatgctcggtggtatgaaggagggggggcggtgcttcttagagaccgccgggggacgtggggttggtgtgcagaggcacgcgcacccgcgtcggccaggtgggccggtaccccatcccccctcccccgacccttcccacccccgcgtgccagagatcaccccggtcccccggcacccgccactcctccatatcctcgctttaggaacaactttagggggggtacacacgcgccgtgcatttccttccacaccccccctcccccgcactcccccccccccggcagtaagacccaagcatagagagccaggcacaaaaacacaggcggggtgggacacatgccttcttggagtacgtgggtcattggcgtggggggttacagcgacaccggccgaccccctggcggtcttccagccggcccttagataagggggcagttggtggtcggacgggtaagtaacagagtctgactaagggtgggagggggggaaaagaacgggctggtgtgctgtaacacgagcccacccgcgagtggcgtggccgaccttagcctctggggcgccccctgtcgtttgggtcccccccctctattggggagaagcaggtgtctaacctacctggaaacgcggcgtctttgttgaaccacaccggggcgcccttgacgagtgggataacgggggaggaagggagggaggagggtactgggggtgaagaaggggggggggggagaagcgagaacaggaaaggcgacggagcccgacaaaacaccgagaaaaaaaaaccacagcgcatgcgccgggccgttgtggggccccgggccggggccccttgggtccgccggggccccgggccgggccgccacgggggccggccgttggcggtaaccccgattgtttatctcaggccccgggccgggaacccggaaaagcctccggggggcctttttcgcgtcgcgtgccggcgagcgggcccggacggggcccggaccgccgcggtcgggggccccctcgtcccgggccgtacgcggccttcgccccgtgaggggacagacgaacgaaacattccggcgacggaacgaaaaacaccccagacgggttaaagaaacagaaaccgcaaccccccccacccccgaaacggggaaaacaaaaaacagaccagcggccggccggcgcttagggggaggatgtcgccgacgccccttggccgccccggctgcaggggggcccggagagccgcggcacccggacgcgcccggaaagtctttcgcaccacccgcgatcggcacggccgcgcccccgcttttataaaggctcagatgacgcagcaaaaacaggccacagcaccacgtgggtaggtgatgtaattttattttcctcgtctgcggcctaatggatttccgggcgcggtgcccctgtctgcagagcacttaacggattgatatctcgcgggcacgcgcgcccttaatggaccggcgcggggcggggggccggatacccacacgggcgggggggggggtgtcgcgggccgtctgctggcccgcggccacataaacaatgactctgggcctttctgcctctgccgcttgtgtgtgcgcgcgccggctctgcggtgtcggcggcggctgcggcggctgcggcggccgccgtgttcggtctcggtagccggccggcgggtggactcgcggggggccggagggtggaaggcaggggggtgtaggatgggtatcaggacttccacttcccgtccttccatcccccgttcccctcggttgttcctcgcccccccccacaccccgccgctttccgttggggttgttattgttgtcgggatcgtgcgggccgggggtcgccggggcaggggcgggggcgggggtgctcgtcgatcgaccgggctcagtgggggcgtggggtgggggggaaaaggcgaagagactgggggtgggggggggtgtcgggggtggctgtttttttttgtgggtgttttttgtggctgttcccgtcccccgtcacccccctccctccgtccccccgtcgcgggtgtttgtgtttgtttattccgacatcggtttatttaaataaacacagccgttctgcgtgtctgttcttgcgtgtggctgggggcttatatgtggggtcccgggggcgggatggggtttagcggcggggggcggcgcgccggacggggcgctggagataacggcccccggggaacgggggaccggggctgggtctcccgaggtgggtgggtgggcggcggtggccgggccgggccgggccgggtgggcggggtttggaaaaacgaggaggaggaggaggagaaggagggggggggagacggggggaaagcaaggacacggcccggggggtgggagcgcgggccgggccgctcgtaagagccgcgacccggccgccggggagcgttgtcgccgtcggtctgccggcccccgtccctcccttttttgaccaaccagcgcccccccccctcaccaccattcctaccaccaccaccaccaccgacacctcccgcacacccccgcccacactccccccccccacccaacccgcaccacgagcacgggttgggggtagcaggggatcaaaggggggcaaggccggcggggcggttcgggggcgggggcgggagaccgagtaggccccgcccatccgcggcccctcccggcagccacgccccccagcgtcgggtgtcacggggaaagagcagggggagaggggagagggggggagaggggagagggggggagaggggagagggggggagaggggagagggggggagaggggagagggggggagaggggagagggggggagaggggagagggggggagaggggagagggggggagaggggagagggggggagaggggagagggggggagagggggtatataaaccaacgaaaagcgcgggaacggggatacggggcttgtgtggcacgacgtcgtggttgtgttactgggcaaacacttggggactgtaggtttctgtgggtgccgaccctaggcgctatggggattttgggttgggtcgggcttattgccgttggggttttgtgtgtgcgggggggcttgtcttcaaccgaatatgttattcggagtcgggtggctcgagaggtgggggatatattaaaggtgccttgtgtgccgctcccgtctgacgatcttgattggcgttacgagaccccctcggctataaactatgctttgatagacggtatatttttgcgttatcactgtcccggattggacacggtcttgtgggataggcatgcccagaaggcatattgggttaacccctttttatttgtggcgggttttttggaggacttgagtcaccccgcgtttcctgccaacacccaggaaacagaaacgcgcttggccctttataaagagatacgccaggcgctggacagtcgcaagcaggccgccagccacacacctgtgaaggctgggtgtgtgaactttgactattcgcgcacccgccgctgtgtagggcgacaggatttgggacctaccaacggaacgtctggacggaccccggttctgccgccggacgatgaagcgggcctgcagccgaagcccctcaccacgccgccgcccatcatcgccacgttggaccccaccccgcgacgggacgccgccgcaaaaagcagacgccgacgaccccactcccggcgcatctaatgatgccgcgacggaaacccgtccgggttcggggggcgaaccggccgcctgtcgctcgtcagggccggcgggcgctcctcgccgccctagaggctgtcccgctggtgtgacgttttcctcgtccgcgccccccgaccctcccatggatttaacaaacgggggggtgtcgcctgtggcgacctcggcgcctctggactggaccacgtttcggcgtgtgtttctgatcgacgacgcgtggcggcccctgttggagcctgagctggcgaaccccttaaccgcccacctcctgaccgaatataatcgtcggtgccagaccgaagaggtgctgccgccgcgggaggatgtgttttcgtggactcgttattgcacccccgacgaggtgcgcgtggttatcatcggccaggacccatatcaccaccccggccaggcgcacggacttgcgtttagcgtgcgcgcgaacgtgccgcctcccccgagtcttcggaatgtcttggcggccgtcaagaactgttatcccgaggcacggatgagcggccacggttgcctggaaaagtgggcgcgggacggcgtcctgttactaaacacgaccctgaccgtcaagcgcggggcggcggcgtcccactctagaatcggttgggaccgcttcgtgggcggagttatccgccggttggccgcgcgccgccccggcctggtgtttatgctctggggcgcacatgcccagaatgccatcaggccggaccctcgggtccattgcgtcctcaagttttcgcacccgtcgcccctctccaaggttccgttcggaacatgccagcatttcctcgtggcgaatcgatatctcgagacccggtcgatttcacccatcgactggtcggtttgaaaggcatcgacgtccggggttttcgtctgtgggggcttttgggtatttccgatgaataaagacggttaatggttaaacctctggtctcatacgggtcggtgatgtcgggcgtcgggggagagggagttccctctgcgcttgcgattctagcctcgtggggctggacgttcgacacgccaaaccacgagtcagggatatcgccagatacgactcccgcagattccattcggggggccgctgtggcctcacctgaccaacctttacacgggggcccggaacgggaggccacagcgccgtctttctccccaacgcgcgcggatgacggcccgccctgtaccgacgggccctacgtgacgtttgataccctgtttatggtgtcgtcgatcgacgaattagggcgtcgccagctcacggacaccatccgcaaggacctgcggttgtcgctggccaagtttagcattgcgtgcaccaagacctcctcgttttcgggaaacgccccgcgccaccacagacgcggggcgttccagcgcggcacgcgggcgccgcgcagcaacaaaagccttcagatgtttgtgttgtgcaaacgcacccacgccgctcgagtgcgagagcagcttcgggtcgttattcagtcccgcaagccgcgcaagtattacacgcgatcttcggacgggcggctctgccccgccgtccccgtgttcgtccacgagttcgtctcgtccgagccaatgcgcctccaccgagataacgtcatgctggcctcgggggccgagtaaccgcccccccgcgccaccctcactgcccgtcgcgcgtgtttgatgttaataaataacgcataaatttggctggttgtttgttgtctttaatggaccgcccgcagggggggtggcatttcagtgtcgggtgacgagcgcgatccggccgggatcctaggaccccaaaagtttgtctgcgtattccagggcggggctcagttgaatctcccgcagcacctctaccagcaggtccgcggtgggctggagaaactcggccgtcccggggcaggcggtcgtcgggggtggaggcgcggcgcccaccccgtgtgccgcgcctggcgtctcctctgggggcgacccgtaaatggttgcagtgatgtaaatggtgtccgcggtccagaccacggtcaaaatgccggccgtggcgctccgggcgctttcgccgcgcgaggagctgacccaggagtcgaacggatacgcgtacatatgggcgtcccacccgcgttcgagcttctggttgctgtcccggcctataaagcggtaggcacaaaattcggcgcgacagtcgataatcaccaacagcccaatgggggtgtgttggataacaacgcctccgcgcggcaggcggtcctggcgctcccggccccgtaccatgatcgcgcgggtgccgtactcaaaaacatgcaccacctgcgcggcgtcgggcagtgcgctggtcagcgaggccctggcgtggcataggctatacgcgatggtcgtctgtggattggacatctcgcggtgggtagtgagtcccccgggccgggttcggtggaactgtaaggggacggcgggttaatatacaatgaccacgttcggatcgcgcagagccgatagtatgtgcttactaatgacgtcatcgcgctcgtggcgctcccggagcggatttaagttcatgcgaaggaattcggaggaggtggtgcgggacatggccacgtacgcgctgttgaggcgcaggttgccgggcgtaaagcagatggcgaccttgtccaggctaaggccctgggagcgcgtgatggtcatggcaagcttggagctgatgccgtagtcggcgtttatggccatggccagctccgtagagtcaatggactcgacaaactcgctgatgttggtgttgacgacggacatgaagccgtgttggtcccgcaagaccacgtaaggcaggggggcctcttccagtaactcggccacgttggccgtcgcgtgccgcctccgcagctcgtccgcaaaggcaaacacccgtgcgtacgtgtatcccatgagcgtataattgtccgtctgcagggcgacggacatcagccccccgcgcggcgagccggtcagcatctcgcagccccggaagataacgttgtccacgtacgtgctaaagggggcgccttcaaatgcctccccaaagagctcttggaggattcggaatctcccgaggaaggcccgcttcagcagcgcaaactgggtgtgaacggcggcggtggtctccggttccccgggggtgtagtggcagtaaaacacgtcgagctgttgttcgtccagccccgcgaaaataacgtcgaggtcgtcgtcgggaaaatcgtccgggcccccgtcccgcggccccagttgcttaaaatcaaacgcacgctcgccgggggcgcctgcgtcggccattaccgacgcctgcgtcggcacccccgaagatttggggcgcagagacagaatctccgccgttagttctcccatgcgggcgtaggcgagggtcctctgggtcgcatccaggcccgggcgctgcagaaagttgtaaaaggagataagcccgctaaatatgagccgcgacaggaacctgtaggcaaactccaccgaagtctccccctgagtctttacaaagctgtcgtcacgcaacactgcctcgaaggcccggaacgtcccactaaacccaaaaaccagttttcgcaggcgcgcggttaccgcgatctggctgttgaggacgtaagtgacgtcgttgcgggccacgaccagctgctgtttgctgtgcacctcgcagcgcatgtgccccgcgtcctggtcctggctctgcgagtagttggtgatgcggctggcgttggccgtgagccacttttcaatagtcaggccgggctggtgtgtcagccgtcggtattcgtcaaactccttgaccgacacgaacgtaagcacggggagggtgaacacgacaaactccccctcacgggtcaccttcaggtaggcgtggagcttggccatgtacgcgctcacctctttgtgggaggagaacaaccgcgtccagccggggaggttggcggggttggtgatgtagttttccgggacgacgaagcgatccacgaactgcatgtgctcctcggtgatgggtaggccgtactccagcaccttcatgaggttaccgaactcgtgctcgatgcaccgtttgttgttaataaaaatggcccagctatacgagaggcgggcgtactcccgcagcgtgcggttgcagatgaggtacgtgagcacgttctcgctctggcggacggaacaccgcagtttctggtgctcgaaggtcgactccagggacgccgtctgtgtcggcgagcccacacacaccaacacgggccgcaggcgggccgcgtactggggggtgtggtacagggcgttaatcatccaccagcaatacaccacggccgtgaggaggtgacgcccaaggagcccggcctcgtcgatgacgatcacgttgctgcgggtaaaggccggcagcgccccgtgggtggccggggccaaccgcgtcagggcgccctcggccaaccccagggtccgttccagggcggccagggcgcgaaactcgttccgcgactcctcgcccccggaggcggccagggtgcgcttcgtgaggtccaaaatcacctcccagtagtacgtcagatctcgtcgctgcaggtcctccagcgaggcggggttgctggtcagggtgtacgggtactgccccagttgggcctggacgtgattcccgcgaaacccaaattcatgaaagatggtgttgatgggtcggctgagaaaggcgcccgagagtttggcgtacatgttttgggccgcaatgcgcgtggcgcccgtcaccacacagtccaagacctcgttgattgtctgcacgcacgtgctctttccggagccagcgttgccggtgataagatacaccgcgaacggaaactccctgaggggcaggcctgcgggggactctaaggccgccacgtcccggaaccactgcagacggggcacttgcgctccgtcgagctgttgttgcgagagctctcggatgcgcttaaggattggctgcaccccgtgcatagacgtaaaatttaaaaaggcctcggccctccctggaacggctggtcggtccccgggttgctgaaggtgcggcgggccgggtctctgtccgtctagctggcgctccccgccggccgccgccatgaccgcaccacgctcgcgggcccccactacgcgtgcgcggggggacacggaagcgctgtgctcccccgaggacggctgggtaaaggttcaccccacccccggtacgatgctgttccgcgagattctccacgggcagctggggtataccgagggccagggggtgtacaacgtcgtccggtccagcgaggcgaccacccggcagctgcaggcggcgatctttcacgcgctcctcaacgccaccacttaccgggacctcgaggcggactggctcggccacgtggcggcccgcggtctgcagccccaacggctggttcgccggtacaggaacgcccgggaggcggatatcgccggggtggccgagcgggtgttcgacacgtggcggaacacgcttaggacgacgctgctggactttgcccacgggttggtcgcctgctttgcgccgggcggcccgagcggcccgtcaagcttccccaaatatatcgactggctgacgtgcctggggctggtccccatattacgcaagcgacaagaagggggtgtgacgcagggtctgagggcgtttctcaagcagcacccgctgacccgccagctggccacggtcgcggaggccgcggagcgcgccggccccgggttttttgagctggcgctggccttcgactccacgcgcgtggcggactacgaccgcgtgtatatttactacaaccaccgccggggcgactggctcgtgcgagaccccatcagcgggcagcgcggagaatgtctggtgctgtggcctcccttgtggaccggggaccgtctggtcttcgattcgcccgtacagcggctgtttcccgagatcgtcgcgtgtcactccctccgggaacacgcgcacgtctgccggctgcgcaataccgcgtccgtcaaggtgctgctggggcgcaagagcgacagcgagcgcggggtggccggcgccgcgcgggtcgttaacaaggtgttgggggaggacgacgagaccaaggccgggtcggccgcctcgcgcctcgtgcggcttatcatcaacatgaagggcatgcgccacgtaggcgacattaacgacactgtgcgtgcctacctcgacgaggccggggggcacctgatagacgccccggccgtcgacggtaccctcccgggattcggcaagggcggaaacagccgcgggtctgcgggccaggaccagggggggcgggcgccgcagcttcgccaggccttccgcacggccgtggttaacaacatcaacggcgtgttggagggctatataaataacctgtttggaaccatcgagcgcctgcgcgagaccaacgcgggcctggcgacccagttgcaggagcgcgaccgcgagctccggcgcgcaacatcgggggccctggagcgccagcagcgcgcggccgacctggcggccgagtccgtgaccgggggatgcggcagccgccctgcgggggcggacctgctccgggccgactatgacattatcgacgtcagcaagtccatggacgacgacacgtacgtcgccaacagttttcagcacccgtacatcccttcgtacgcccaggacctggagcgcctgtcgcgcctctgggagcacgagctggtgcgctgtttcaaaattctgtgtcaccgcaacaaccagggccaagagacgtcgatctcgtactccagcggggcgatcgccgcattcgtcgccccctactttgagtcagtgcttcgggccccccgggtaggcgcgcccatcacgggctccgatgtcatcctgggggaggaggagttatgggatgcggtgtttaagaaaacccgcctgcaaacgtacctgacagacatcgcggccctgttcgtcgcggacgtccagcacgcagcgctgcccccgcccccctccccggtcggcgccgatttccggcccggcgcgtccccgcggggccggtccagatcgcggtcgcccggaagaactgcgcgaggcgcgccggaccagggcgggggcatcgggcaccgggatggccgccgcgacggccgacgatgaggggtcggccgccaccatcctcaagcaggccatcgccggggaccgcagcctggtcgaggcggccgaggcgattagccagcagacgctgctccgcctggcctgcgaggtgcgccaggtcggcgaccgccagccgcggtttaccgccaccagcatcgcgcgcgtcgacgtcgcgcctgggtgccggttgcggttcgttctggacgggagtcccgaggacgcctatgtgacgtcggaggattactttaagcgctgctgcggccagtccagttatcgcggcttcgcggtggcggtcctgacggccaacgaggaccacgtgcacagcctggccgtgccccccctcgttctgctgcaccggttctccctgttcaaccccagggacctcctggactttgagcttgcctgtctgctgatgtacctggagaactgcccccgaagccacgccaccccgtcgacctttgccaaggttctggcgtggctcggggtcgcgggtcgccgcacgtccccattcgaacgcgttcgctgccttttcctccgcagttgccactgggtcctaaacacactcatgttcatggtgcacgtaaaaccgttcgacgacgagttcgtcctgccccactggtacatggcccggtacctgctggccaacaacccgccccccgttctctcggccctgttctgtgccaccccgacaagctcctcattccggctgccggggccgcccccccgctccgactgcgtggcctataaccccgccgggatcatggggagctgctgggcgtcggaggaggtgcgcgcgcctctggtctattggtggctttcggagaccccaaaacgacagacgtcgtcgctgttttatcagttttgttgaattttaggaaataaacccggttttgtttctgtggcctcccgacggatgcgcgtgtccttactccgtcttggtgggtgggtggctgtgtatggcgtcccatctgtgcggggaggggggcaagtcggcacgtattcggacagactcaagcacacacgggggagcgctcttgtctcagggcaatgtttttattggtcaaactcaggcaaacagaaacgacatcttgtcgtcaaagggatacacaaacttccccccctcgccccatactcccgccagcaccccggtaaacaccaactcaatctcgcgcaggatttcgcgcaggtgatgagcgcagtccacgggggggagcacaaggggccgcgggtatagatcgacggggacgccgaccgactccccgcctccgggacagacacgcacgacgcgccgccagtagtgctctgcgtccagcaaggcgccgccgcggaaggcagtggggggcaaggggtcgctggcctcaaagggggacacccgaacgctccagtactccgcgtccaaccgtttattaaacgcgtccaagataaggcggtcgcaggcgtcctccataaggccccgggccgtgagtgcgtcctcctccggcacgcctgccgttgtcaggcccaggacccgtcgcagcgtgtcgcgtacgaccccggccgccgtggtgtacgcgggcccgcggagaggaaatcccccaagatggtcagtgttgtcgcgggagttccagaaccacactcccgcctggctccaggcgactgcgtgggtgtagacgccctcgagggccaagcacagtgggtgccgcagccggaggccgttggccctaagcacggctcccacggccgtctcgatggcccgccgggcgtcctcgatcaccccggaagccgcatccgcgtcttgggggtccacgttaaagacaccccagaacgcacccccatcgcccccgcagaccgcgaacttcaccgagctggccgtctcctcgatctgcaggcagacggcggccattaccccacccaggagctgccgcagcgcagggcaggcgttgcacgtgtccgggaccaggcgctccaagacggccccggcccagggctctgagggagcggccaccaccagcgcgtccagtcttgctaggcccgtccggccgtgggggtccgccagcccgctccccccgaggtcggccagggccgccaggagctgggcgcgaagtccggggaagcaaaaccgcgccgtccagacgggcccgacggccgcgggcgggtctaacagttggatgattttagtggcgggatgccaccgcgccaccgcctcccgcactgcgggcaggaggcatccggctgccgccgaggccacgccgggccaggctcgcggggggaggacgaccctgacccccaccgcgggccaggcccccaggagcgcggcgtaagcggccgcggccccgcgcaccaggtcccgtgccgactcggccgtggccggcacggtgaacgtgggccaacccggaaaccccaggacggcaaagtacgggacgggtcccccccggacctcaaactcgggccccagaaaggcaaagacgggggccagggccccgggggcggcgtggaccgtggtatgccactgccggaaaagggcgacgagcgccggcgcggagaacttctcgccggcgcttacaaagtagtcgtaatcgcggggcagcagcacccgtgccgtgactcgttgtgggtgcccgcgtggccgcaggcccacctcgcacacctcgaccaggtccccgaacgcgccctccttcttgatcggcggaaacgcaagagtctggtattcgcgcgcaaatagcgcggttccggtggtgatgttaacggtcagcgaagcggtggacgcgcactggggggtgtcgcgaatggccgccaggcgcgcccacgccagccgcgcgtcgggatgctcggcaacgcgcgccgccagggccatagggtcgatgtcaatgttggcctccgcgaccaggagagcggcgcgaggggcggcgggcgggccccacgacgctctctcaactttcaccaccagtcccgtgcgtgggtccgagccgatacgcagcggggcgaacagggccaccggcccggtctggcgctccagggccgccaggacgcacgcgtacagcgcccgccacagagtcgggttctccaggggctccagcggggaggcggccggcgtcgtcgcggcgcgggcggccgccacgacggcctggacggagacgtccgcggagccgtagaaatcccgcagctccgtcgcggtgacggagacctccgcaaagcgcgcgcgaccctcccctgcggcgttgcgacatacaaaatacaccagggcgtggaagtactcgcgagcgcgggggggcagccataccgcgtaaagggtaatggcgctgacgctctcctccacccacacgatatctgcggtgtccatcgcacggcccctaaggatcacgggcggtctgtgggtcccatgctgccgtgcctggccgggcccggtgggttgcggaaaccggtgacgggggggggggcggtttttggggttggggtgggaaacggcccgggtccgggggccaacttggcccctcggtgcgttccggcaacagcgccgccggtccgcggacgaccacgtaccgaacgagtgcggtcccgagacttatagggtgctaaagttcaccgccccctgcatcatgggccaggcctcggtggggagctccgacagcgccgcctccaggatgatgtcagcgttggggttggcgctggatgagtgcgtgcgcaaacagcgcccccacgcgggcacgcgtagcttgaagcgcgcgcccgcaaactcccgcttgtgggccataagcagggcgtacagctgcctgtgggtccggcaggcgctgtggtcgatgtggtgggcgtccaacaaccccacgattgtctgtttggtgaggtttttaacgcgccccgccccgggaaacgtctgcgtgcttttggccatctgcacgccaaacagttcgccccagattatcttgaacagcgccaccgcgtggtccgtctcactaacggaccgcgcgggggacagccgcttagggcgtcggcgacgcgcttgacggcttcctccgagagcagaagtccgtcggttacgttacagtggcccagttcgaacaccagctgcatgtagcggtcgtagtggggggtcagcaggtccagcacgtcatcggggccgaaggtcctcccagatcccccggccgccgagtcccaatgcaggcgcgcggccatggtgctgcacaggcacaacagctcccagacaggggttacgttcagggtggggggcagggccacgagctccagctctccggtgacgttgatcgtggggatgacgcccgtggcgtagtggtcatagatccgccgaaatatggcgctgctgcgggtggccatgggaacgcggagacaggcctccagcaacgccaggtaaataaaccgcgtgcgtcccatcaggctgttgaggttgcgcatgagcgcgacaatttccgccggcgcgacatcggaccggaggtatttttcgacgaaaagacccacctcctccgtctcggcggcctgggccggcagcgacgcctcgggatcccggcaccgcagctcccgtagatcgcgctgggccctgagggcgtcgaaatgtacgccccgcaaaaacagacagaagtcctttggggtcagggtatcgtcgtgtccccagaagcgcacgcgtatgcagtttagggtcagcagcatgtgaaggatgttaaggctgtccgagagacacgccagcgtgcatctctcaaagtagtgtttgtaacggaatttgttgtagatgcgcgacccccgccccagcgacgtgtcgcatgccgacgcgtcacagcgccccttgaaccggcgacacagcaggtttgtgacctgggagaactgcgcgggccactggccgcaggaactgaccacgtggttcaggagcatgggcgtaaagacgggctccgagcgcgccccggagccgtccatgtaaatcagtagctcccccttgcggagggtgcgcacccgtcccagggactggtacacggacaccatgtccggtccgtagttcatgggtttcacgtaggcgaacatgccatcaaagtgcaggggatcgaagctgaggcccacggttacgaccgtcgtgtatataaccacgcggtattggccccacgtggtcacgtccccgaggggggtgagcgagtgaagcaacagcacgcggtccgtaaactgacggcagaaccgggccacgatctccgcgaaggagaccgtcgacgaaaaaatgcagatgttatcgcccccgccaaggcgcgcttccagctccccaaagaacgtggccccccgggcgtccggagaggcgtccggagacgggccgctcggcggcccgggcgggcgcagggcagcctgcaggagctcggtccccagacgcgggagaaacaggcaccggcgcgccgaaaacccgggcatggcgtactcgccgaccaccacatgcacgtttttttcgccccggagaccgcacaggaagtccaccaactgcgcgttggcggttgcgtccatggcgatgatccgaggacatgtgcgcagcaggcgtagcattaacgcatccacgcggcccagttgctgcatcgttggcgaatagagctggcccagcgtcgacataacctcgtccagaacgaggacgtcgtagttgttcagaaggttggggcccacgcgatgaaggctttccacctggacgataagtcggtggaaggggcggtcgttcataatgtaattggtggatgagaagtaggtgacaaagtcgaccaggcctgactcagcgaaccgcgtcgccagggtctgggtaaaactccgacgacaggagacgacgagcacactcgtgtccggagagtggatcgcttcccgcagccagcggatcagcgcggtagtttttcccgaccccattggcgcgcggaccacagtcacgcacctggccgtcggggcgctcgcgttggggaaggtgacgggtccgtgctgctgccgctcgatcgttgttttcgggtgaacccggggcacccattcggccaaatcccccccgtataacatccgcgctagcgatacgctcgacgtgtactgttcgcactcgtcgtccccaatgggacgcccggcccccagaggatcccccgactccgcgccccccacgaaaggcatgaccggggcgcggacggcgtggtgggtctggtgtgtgcaggtggcgacgtttgtggtctctgcggtctgcgtcacggggctcctcgtcctggcctctgtgttccgggcacggtttccctgcttttacgccacggcgagctcttatgccggggttaactccacggccgaggtgcgcgggggtgtagccgtgcccctcaggttggacacgcagagccttgtgggcacttatgtaatcacggccgtattgttgttggccgcggccgtgtatgccgtggtcggcgccgtgacctcccgctacgaccgcgccctggacgcgggccgccgtctggctgcggcccgcatggccatgccgcacgccacgctgatcgccggaaacgtctgctcttggttgctgcagatcaccgtcctgctgctggcccatcgcatcagccagctggcccacctggtttacgtcctgcactttgcgtgtctggtgtattttgcggcccatttttgcaccaggggggtcctgagcgggacgtatctgcgtcaggtgcacggcctgatggagctggccccgacccatcatcgcgtcgtcggcccggctcgcgccgtgctgacaaacgccttgctgttgggcgtcttcctgtgcacggccgacgccgcggtatccctgaataccatcgccgcgttcaactttaatttttcggccccgggcatgctcatctgcctgaccgtgctgttcgccattctcgtcgtatcgctgttgttggtggtcgagggggtgttgtgtcactacgtgcgcgtgttggtgggcccccacctgggggccgttgccgccacgggcatcgtcggcctggcctgcgagcactattacaccaacggctactacgtggtggagacgcagtggccgggggcacagacgggagtgcgcgtcgccctcgccctggtcgccgcctttgccctcggcatggccgtgctccgctgcacccgcgcctatctgtatcacaggcggcaccacaccaaattttttatgcgcatgcgcgacacgcgacaccgcgcacattccgccctcaagcgcgtacgcagttccatgcgcggatcgcgagacggccgccacaggcccgcgcccggcagcccgcccgggattcccgaatatgcggaagacccctacgcgatctcatacggcggccagctcgaccggtacggagattccgacggggagccgatttacgacgaggtggcggacgaccaaaccgacgtattgtacgccaagatacaacacccgcggcacctgcccgacgacgagcccatctatgacaccgttggggggtacgaccccgagcccgccgaggaccccgtgtacagcaccgtccgccgttggtagctgtttggttccgttttaataaaccgtttgtgtttaacccgaccgtggtgtatgtctggtgtgtggcgtccgatcccgttactatcaccgtccccccccctcaaccccggcgattgtgggttttttaaaaacgacacgcgtgcgaccgtatacagaacattattttggtttttattcgctatcggacatggggggtggaaactgggtggcggggcaggcgcctccgggggtccgccggtgagtgtggcgcgagggggggtccgacgaacgcaggcgcggtctccccggggcccgcgtaaccacgcgcatatccgggggcacgtagaaattaccttcctcttcggactcgatatccacgacgtcaaagtcgtgggcggtcagcgagacgacctccccgtcgtcggtgatgaggacgttgtttcggcagcagcagggccgggccccggagaacgagaggcccatagctcggcgagcgtgtcgtcgaacgccaggcggctgcttcgctggatggccttatagatctccggatcgatgcggacgggggtaatgatcagggcgatcggaacggcctggttcgggagaatggacgccttgctgggtcctgcggccccgagagccccggcgccgtcctccaggcggaacgttacgccctcctccgcgctggtgcggtgcctgccgataaacgtcaccagatgcgggtggggggggcagtcggggaagtggctgtcgagcacgtagccctgcaccaagatctgcttaaagttcgggtggcgggggttcgcgaagacgggctcgcggcggaccagatccccggagctccaggacacgggggagatggtgtggcgtccgaggtcgggggcgccaaacagaagcacctccgagacaacgccgctatttaactccaccaaggcccgatccgcggcggagcaccgccttttttcgcccgaggcgtgggcctctgaccaggcctggtcttgcgtgacgagagcctcctccgggccggggacgcgcccgggcgcgaagtatcgcacgctgggcttcgggatcgaccggataaatgcccggaacgcctccggggaccggtgtgccatcaagtcctcgtacgcggaggccgtggggtcgctggggtccatggggtcgaaagcgtacttggcccggcatttgacctcgtaaaaggccaggggggtcttggggactggggccaggtagccgtgaatgtcccgaggacagacgagaatatccagggacgccccgaccatccccgtgtgaccgtccatgaggaccccacacgtatgcacgttctcttcggcgaggtcgctgggttcgtggaagataaagcgccgcgtgtcggcgccggcctcgccgccgtcgtccgcgcggcccacgcagtagcgaaacagcaggcttcgggccgtcggctcgttcacccgcccgaacatcaccgccgaagactgtacatccggtcgcaggctggcgttgtgcttcagccactggggcgagaaacacggaccctgggggccccagcggagggtggatgcggtcgtgaggccccgccggagcagggcccatagctggcagtcggcctggttttgcgtggccgcctcgtaaaaccccatgaggggccggggcgccacggcgtccgcggcggccgggggggcgcggcgcgtcaggcgccataggtgccggccgagtccgcggtccaccatacccgcctcctcgaggaccacggccagggaacacagataatccaggcgggcccagaggggaccgatggccagaggggcgcggacgccgcgcagcaacccgcgcaggtggcgctcgaacgtctcggctagtatatgggagggcagcgcgttggggatcaccgacgccgaccacatagagtcaaggtccggggagtcgggatcggcgtccgggtcgcgggcgtgggtgcccccaggagatagcggaatgtccggggtcggaggcccggaggcgtcagaaagtgccggcgacgcggcccggggcttttcgtctgcggtgtcggtggcgtgctgatcacgtggggggttatcgggcgaatgggagctcgggtccacagctgacgtcgtctggggtggggggggcaggggacggaaggtggttgtcagcggaagactgttagggcgggggcgcttgggggggctgtcggggccacgaggggtgtcctcggccagggcccagggacgcttagtcacggtgcgtcccggcggacatgctgggcctaccgtggactccatttccgagacgacgtggggggagcggtggttgagcgcgccgccgggtgaacgctgattctcacgacagcgcgtgccgcgcgcacgggttggtgtgatacaggcgggacaccagcaccaggagaggcttaagctcgggaggcagcgccaccgacgacagtatcgccttgtgtgtgtgctggtaatttatacaccgatccgtaaacgcgcgccgaatcttgggattgcggaggtggcgccggatgccctctgggacgtcatacgccaggccgtgggtgttggtctcggccgagttgacaaacagggctgggtgcagcacgcagcgataggcgagcagggccagggcgaagtccggcgacagctggttgttgaaatactggtaaccgggaaaccgggtcacgggtacgcccaggctcggggcgacgtacacgctaaccaccaactccagcagcgtctggcccagggcgtacaggtcaaccgctagcccgacgtcgtgcttcaggcggtggttggtaaattcggcccgttcgttgttaaggtatttcaccaacagctccgggggctggttatacccgtgacccaccagggtgtgaaagttggctgtggttagggcggtgggcatgccaaacatccggggggacttgaggtccggctcctggaggcaaaactgcccccgggcgatcgtggagttggagttgagggtgacgaggctaaagtcggcgaggacggcccgccggagcgagacggcgtccgaccgcagcatgacgaggatgttggcgcacttgatatccaggtggctgatcccgcaggtggtgtttaaaaacacaacggcacgggccagctccgtgaagcactggtggagggccgtcgagaccgaggggtttgttgtgcgcagggacgccagttggccgatatacttaccgaggtccatgtcgtacgcggggaacactatctgtcgttgttgcagcgagaacccgaggggcgcgatgaagccgcggatgttgtgggtgcggccggcgcgtagagcgcactccccgaccaacagggtcgcgatgagctcaacggcaaaccactccttttcctttatggtcttaacggcaagcttatgttcgcgaatcagttggacttcgccgtatcccccagaccccccgaagcttcgggccccggggatctcgagggtcgtgtagtgtagggcggggttgatggcgaacacggggctgcatagcttgcggatgcgcgtgagggtgaggatgtgcgagggggacgaggggggtgcggttaacgccgcctgggatctgcgcaggggcgggcggttcagtttggccgccgtaccgggcgcctcgggggacgcgcggcgatgagacgagcggctcattcgccatcgggatagtcccgcgcgaagccgctcgcggaggccggatcggtggcggcacccgtgggaggagcgggagacggcggcgttctggagagaggggccgctggggcgcccggaggccccatgggggttggagtgtatgtaggatgcgagccaatccttgaaggaccgttggcgtgcaccttgggggctgaggttagctgccacatgaccagcaggtcgctgtctgcgggactcatccatccttcggccaggtcgccgtctccccacagagaagcgttggtcgctgcctcctcgagttgctcctcctggtccgcaagacgatcgtccacggcgtccaggcgctcaccaagcgccggatcgaggtaccgtcggtgtgcggttagaaagtcacgacgcgccgcttgctcctccacgcgaattttaacacaggtcgcgcgctgtcgcatcatctctaagcgcgcgcgggactttagccgcgcctccaattccaagtgggccgcctttgcagccataaaggcgccaacaaaccgaggatcttgggtgctgacgccctcccggtgcagctgcagggtctggtccttgtaaatctcggctcggaggtgcgtctcggccaggcgtcggcgcagggccgcgtgggcggcatctcggtccattccgccaccctgcgggcgacccgggggtgctctgatagtctcgcgtgcccaaggcccgtgatcggggtacttcgccgccgcgacccgccacccggtgtgcgcgatgtttggtcagcagctggcgtccgacgtccagcagtacctggagcgcctcgagaaacagaggcaacttaaggtgggcgcggacgaggcgtcggcgggcctcacaatgggcggcgatgccctacgagtgccctttttagatttcgcgaccgcgacccccaagcgccaccagaccgtggtcccgggcgtcgggacgctccacgactgctgcgagcactcgccgctcttctcggccgtggcgcggcggctgctgtttaatagcctggtgccggcgcaactaaaggggcgtgatttcgggggcgaccacacggccaagctggaattcctggcccccgagttggtacgggcggtggcgcgactgcggtttaaggagtgcgcgccggcggacgtggtgcctcagcgtaacgcctactatagcgttctgaacacgtttcaggccctccaccgctccgaagcctttcgccagctggtgcactttgtgcgggactttgcccagctgcttaaaacctccttccgggcctccagcctcacggagaccacgggcccccccaaaaaacgggccaaggtggacgtggccacccacggccggacgtacggcacgctggagctgttccaaaaaatgatccttatgcacgccacctactttctggccgccgtgctcctcggggaccacgcggagcaggtcaacacgttcctgcgtctcgtgtttgagatccccctgtttagcgacgcggccgtgcgccacttccgccagcgcgccaccgtgtttctcgtcccccggcgccacggcaagacctggtttctggtgcccctcatcgcgctgtcgctggcctcctttcgggggatcaagatcggctacacggcgcacatccgcaaggcgaccgagccggtgtttgaggagatcgacgcctgcctgcggggctggttcggttcggcccgagtggaccacgttaaaggggaaaccatctccttctcgtttccggacgggtcgcgcagtaccatcgtgtttgcctccagccacaacacaaacgtaagtcctcttttctttcgcatggctctcccaaggggccccgggtcgacccgacccacacccacccacccacatacacacacaaccagacgcgggaggaaagtctgccccgtgggcactgatttttattcgggatcgcttgaggaggcccgggcaacggcccgggcaacggtggggcaactcgtagcaaataggcgactgatgtacgaagagaagacacacaggcgccacccggcgctggtcggggggatgttgtccgcgccgcaccgtcccccgacgacctcttgcagacggtccgtgatgcaaggacggcggggggcctgcagcagggtgaccgtatccacgggatggccaaagagaagcggacacaggctagcatccccctggaccgccagggtacactgggccatcttggcccacagacacggggcgacgcagggacaggactccgttacgacggaggagagccacagtgcgttggcggaatcgatgtggggcggcggggcgcaggactcgcagccccccgggtggttagtgatcctggccaggagccatcccagatggcgggccctgcttcccggtggacagagcgaccccaggtcgctgtccatggcccagcagtagatctggccgctggggaggtgccaccaggcccccgggcccaaggcgcagcacgcgcccggctccgggggggtcttcgcggggaccagatacgcgccatccagctcgccgaccactggctcctccgcgagctgttcggtggttgggtcgggggtttcctccgggggggtggccgcccgtatgcgggcgaacgtgagggtgcacaggagcggggtcagggggtgcgtcacgctccggaggtggacgatcgcgcagtagcggcgctcgcggttaaagaaaaagagggcaaagaaggtgttcgggggcaaccgcagcgccttggggcgcgtcagatacagaaaaatctcgcagaagagggcgcgcccggggtctgggttaggaagggccacctgacacagaggctcggtgaggaccgttagacaccgaaagatcttgagccgctcgtccgcccgaacgacgcgccacacaaagacggagttgacaatgcgcgcgatagagtcgacgtccgtccccaggtcgtcgactctgtcgcgcgtgccgcgagctccggcccgggaatccggccggggcaaggtccccgggggaccaggcggcgccaggggccgccggggtcccagctgcgccatgccgggggcggggggagggcaaaccccagaggcgggggccaacggcgcggggaggagtggatgggcgaggtggccgggggaaggcgcccgctagcgagaacggccgttcccggacgacaccttgcgacaaaacctaaggacagcggcccgcgcgacggggtccgagaggctaaggtaggccgcgatgttaatggtgaacgcaaagccgccgggaaagacaactatgccacagaggcggcgattaaaccccaggcagaggtaggcgtagctttccccgggcaggtattgctcgcagaccctgcgtggggctgtggaggggacggcctccatgaagcgacatttactctgctcgcgtttactgacgtcaccatccatcgccacggcgattggacgattgttaagccgcagcgtgtctccgcttgtgctgtagtagtcaaaaacgtaatggccgtcggagtcggcaaagcgggccgggaggtcgtcgccgagcgggacgacccgccgcccccgaccgccccgtccccccaggtgtgccaggacggccagggcatacgcggtgtgaaaaaaggcgtcgggggcggtcccctcgacggcgcgcatcaggttctcgaggagaatggggaagcgcctggtcacctcccccagccacgcgcgttggtcggggccaaagtcatagcgcaggcgctgtgagattcgcgggccgccctgaagcgcggcccggatggcctggcccagggcccggaggcacgccagatgtatgcgcgcggtaaaggcgacctcggcggcgatgtcaaagggcggcaggacggggcgcgggtggcgcaggggcacctcgagcgcgggaaagcggagcagcagctccgcctgcccagcgggagacagctggtgggggcgcacgacgcgttctgcggcgcaggcctcggtcagggccgtggccagcgccgaggacagcagcggagggcgggcgcgtcgcccgccccacgccactgagttctcgtaggagacgacgacgaagcgctgcttggttccgtagtggtggcgcaggaccacggagatagaacgacggctccacagccagtccggccggtcgccgccggccagggcttcccatccgcgatccaaccactcgaccagcgaccgcggctttgtggtaccaggggtaagggttagaacgtcgttcaggatgtcctcgcccccgggcccgtggggcgctggggccacaaagcggcccccgccggggggctccagacccgccagcaccgcatctgcgtcagccgcccccatggcgcccccgctgacggcctggtgaaccagggcgccctggcggagccccgatgcaacgccacaggccgcacgcccggtccgagcgcggaccgggtggcggcgggtgacgtcctgcactgcccgctgaaccaacgcgaggatctcctcgttctcctgtgcgatggacacgtcctgggccgcggtcgtgtcgccgccgggggccgtcagctgctcctccggggagatgggggggtcggacgccccgacgatgggcgggtctgcgggcgcccccgcgtggggccgggccaagggctgcggacgcggggacgcgctttcccccagacccatggacaggtgggccgcggcctccttcgcggccggcggggcggcggcgccaagcagagcgacgtagcggcacaaatgccgacagacgcgcatgatgcgcgtgctgtcggccgcgtagcgcgtgttgggggggacgagctcgtcgtaactaaacagaatcacgcgggcacagctcgcccccgagccccacgcgaggcgcagcgccgccacggcgtacgggtcatagacgccctgcgcgtcacacaccacgggcagggagacgaacaaccccccggcgctggacgcacgcggaaggaggccagggtgtgccggcacgacgggggccagaagctcccccaccgcatccgcgggcacgtaggcggcaaacgccgtgcaccacggggtacagtcgccggtggcatgagcccgagtctggatttcgacctggaagtttgcggccgtcccgagtccggggcggccgcgcatcagggcggccagagggattcccgcggccgccaggcactcgctggatatgatgacgtgaaccaaagacgagggccgacccgggccgtggccgagatcgtactggacctcgttggccaagtgcgcgttcatggttcggggtgggtgtgggtgtgtaggcgatgcgggtcccccgagtccgcgggaagggcgtgggtttggcgcgcgtatgcgtattcgccaacggaggcgtgcgtgcttatgcgcggcgcgtttcttctgtctccagggaatccgaggccaggactttaacctgctctttgtcgacgaggccaactttattcgcccggatgcggtccagacgattatgggctttctcaaccaggccaactgcaagattatcttcgtgtcgtccaccaacaccgggaaggccagtacgagctttttgtacaacctccgcggggccgccgacgagcttctcaacgtggtgacctatatatgcgatgatcacatgccgagggtggtgacgcacacaaacgccacggcctgttcttgttatatcctcaacaagcccgttttcatcacgatggacggggcggttcgccggaccgccgatttgtttctggccgattccttcatgcaggagatcatcgggggccaggccagggagaccggcgacgaccggcccgttctgaccaagtctgcgggggagcggtttctgttgtaccgcccctcgaccaccaccaacagcggcctcatggcccccgatttgtacgtgtacgtggatcccgcgttcacggccaacacccgagcctccgggaccggcgtcgctgtcgtcgggcggtaccgcgacgattatatcatctttgccctggagcacttttttctccgcgcgctcacgggctcggcccccgccgacatcgcccgctgcgtcgtccacagtctgacgcaggtcctggccctgcatcccggggcgtttcgcggcgtccgggtggcggtcgagggaaatagcagccaggactcggccgtcgccatcgccacgcacgtgcacacagagatgcaccgcctactggcctcggagggggccgacgcgggctcgggccccgagcttctcttctaccactgcgagcctcccgggagcgcggtgctgtacccctttttcctgctcaacaaacagaagacgcccgcctttgaacactttattaaaaagtttaactccgggggcgtcatggcctcccaggagatcgtttccgcgacggtgcgcctgcagaccgacccggtcgagtatctgctcgagcagctgaataacctcaccgaaaccgtctcccccaacactgacgtccgtacgtattccggaaaacggaacggcgcctcggatgaccttatggtcgccgtcattatggccatctaccttgcggcccaggccggacctccgcacacattcgctcccatcacacgcgtttcgtgagcgcccaataaacacacccaggtatgctacgcacgaccacggtgtcgcctgttaaggggggggaagggggtgttggcgggaagcgtgggaacacgggggattctctcacgaccggcaccagtaccacccccctgtgaacacagaaacccaacccaaatcccataaacatacgacacacaggcatattttggaatttcttgggtttttatttatttaggtatgctggggtttctccctggatgcccaccccccacccccccccgtgggtctagccgggccttagggatagcgtataacgggggccatgtctccggaccgcacaacggccgcgccgtcaaaggtgcacacccgaaccacgggagccagggccaaggtgtctcctagttggcccgcgtgggtcagccaggcgacgagcgcctcgtaaagcggcagccttcgctctccatcctgcaccagggccggggcttcggggtgaatgagctgggcggcctcccgcgtgacactctgcatctgcaggagagcgttcacgtacccgtcctgggcacttagcgcaaagagccgggggattagcgtaaggatgatggtggttccctccgtgatcgagtaaaccatgttaaggaccagcgatcgcagctcggcgtttacgggaccgagttgttggacgtccgccagcagcgagaggcgactcccgttgtagtacagcacgttgaggtctggcagccctccggggtttctggggctggggttcaggtcccggatgcccctggccacgagccgcgccacgatttcgcgcgccaggggcgatggaagcggaacgggaaaccgcaacgtgaggtccagcgaatccaggcgcacgtccgtcgcttggccctcgaacacgggcgggacgaggctgatggggtccccgttacagagatctacgggggaggtgttgcgaaggttaacggtgccggcgtgggtgaggcccacgtccagggggcaggcgacgattcgcgtgggaagcacccgggtgatgaccgcggggaagcgccttcggtacgccagcaacaaccccaacgtgtcgggactgacgcctccggagacgaaggattcgtgcgccacgtcggccagcgtcagttgccggcggatggtcggcaggaataccacccgcccttcgcagcgctgcagcgccgccgcatcggggcgcgagatgcccgagggtatcgcgatgtcagtttcaaagccgtccgccagcatggcgccgatccacgcggcagggagtgcagtggtggttcgggtggcgggaggagcgcggtgggggtcagcggcgtagcagagacgggcgaccaacctcgcataggacggggggtgggtcttagggggttgggaggcgacagggaccccagagcatgcgcggggaggtctgtcgggcccagacgcaccgagagcgaatccgtccacggagtcccggtctgggttttatggggcccggccctcggaatcgcggcttgtcggcggggacaaagggggcggggctagggggcttgcggaaacagaagacgcgtgggataaaagaatcgcactaccccaaggaagggcggggcggtttattacagagccagtcccttgagcggggatgcgtcatagacgagatactgcgcgaagtgggtctcccgcgcgtgggcttccccgttgcgggcgctgcggaggagggcggggtcgctggcgcaggtgagcgggtaggcctcctgaaacaggccacacgggtcctccacgagttcgcggcaccccggggggcgcttaaactgtacgtcgctggcggcggtggccgtggacaccgccgaacccgtctccacgatcaggcgctccaggcagcgatgtttggcggcgatgtcggccgacgtaaagaacttaaagcaggggctgagcaccggcgaggccccgttgaggtggtaggccccgttatagagcaggtccccgtacgaaaatcgctgcgacgcccacgggttggccgtggccgcaaaggcccgggacgggtcgctctggccgtggtcgtacatgagggcggtgacatccccctccttgtcccccgcgtaaacgcccccggcggcgcgtccccgggggttgcagggccggcggaagtagttgacgtcggtcgacacgggggtggcgataaactcacacacggcgtcctggccgtggtccatccctgcgcgccgcggcacctgggcgcacccgaacacggggacgggctgggccggccccaggcggtttcccgccacgaccgcgttccgcaggtacacggctgccgcgttgtccaggagagggggagccccgcggcccaggtaaaagttttggggaaggttgcccatgtcggtgacggggttgcggacggttgccgtggccacgacggcggtgtagcccacgcccaggtccacgttcccgcgcggctgggtgagcgtgaagtttacccccccgccagtttcgtgccgggccacctggagctggcccaggaagtacgcctccgacgcgcgctccgagaacagcatgttctcagtcacaaagcggtcctgtcggacgacggtgaacccaaacccgggatggaggcccgtcttgagctgatgatgcaaggccacgggactgatcttgaagtaccccgccatgagcgcgtaggtcagcgcgttctccccggccgcgctctcgcggacgtgctgcacgacgggctgtcggatcgacgaaaagtagttggcccccagagccggggggaccagggggacctgccgcgacaggtcgcgcagggccggggggaaattgggcgcgttcgccacgtggtcggccccggcgaacagcgcgttgacgggaagggggtaaaaatagtcgccattttggatggtatggtccagatgctggggggccatcagcaggattccggcgtgcaacgccccgtcgaatatgcgcatgttggtggtggacgcggtgttggcgcccgcgtcgggcgccgccgagcagagcagcgccgttgtgcgttcggccatgttgtgggccagcacctgcagcgtgagcatggcgggcccgtccactaccacgcgcccgttgtgaaacatggcgttgaccgtgttggccaccagattggccgggtgcagggggtgcgcggggtccgtcacggggtcgctggggcactcctcgccgggggcgatctccgggaccaccatgttctgcagggtggcgtatacgcggtcgaagcgaacccccgcggtgcagcagcggccccgcgagaaggcgggcaccatcacgtagtagtaaatcttgtggtgcacggtccagtccgccccccggtgcggccggtcatccgcggcgtccgcggctcgggcctgggtgttgtgcagcagctggccgtcgttgcggttgaagtccgcggtcgccacgttacatgccgccgcgtacacggggtcgtggccccccgcgctaacccggcagtcgcgatggcggtccagggccgcgcgccgcatcagggcgtcacagtcccacacgaggggtggcagcagcgccgggtctcgcattaggtgattcagctcggcttgcgcctgcccgcccagctccgggccggtcagggtaaagtcatcaaccagctgggccagggcctcgacgtgcgccaccaggtcccggtacacggccatgcactcctcgggaaggtctcccccgaggtaggtcacgacgtacgagaccagcgagtagtcgttcacgaacgccgcgcaccgcgtgttgttccagtagctggtgatgcactggacaacgagccgggccagggcgcagaagacgtgctcgctgccgtgtatggcggcctgcagcaggtaaaacaccgccgggtagttgcggtcgtcgaacgccccgcgaacggcggcgatggtggcgggggccatggcgtggcgtcccacccccagctccaggccccgggcgtcccggaacgccgccggacatagcgccaggggcaagttgccgttcaccacgcgccaggtggcctggatctcccccgggccggccgggggaacgtccccccccggcagctccacgtcggccacccccacgaagaagtcgaacgcggggtgcagctcaagagccaggttggcgttgtcgggctgcataaactgctccggggtcatctggccttccgcgacccatcggacccgcccgtgggccaggcgctgcccccaggcgttcaaaaacagctgctgcatgtctgcggcggggccggccggggccgccacgtacgccccgtacggattggcggcttcgacggggtcgcggttaaggcccccgaccgccgcgtcaacgttcatcagcgaagggtggcacacggtcccgatcgcgtgttccagagacaggcgcagcacctggcggtccttcccccaaaaaaacagctggcggggcgggaaggcgcggggatccgggtggccgggggcggggactaggtccccggcgtgcgcggcaaaccgttccatgaccggattgaacaggcccaggggcaggacgaacgtcaggtccatggcgcccaccagggggtagggaacgttggtggcggcgtagatgcgcttctccagggcctccagaaagaccagcttctcgccgatggacaccagatccgcgcgcacgcgcgtcgtctggggggcgctctcgagctcgtccagcgtctgccggttcaggtcgagctgctcctcctgcatctccagcaggtggcggcccacgtcgtccagacttcgcacggccttgcccatcacgagcgccgtgaccaggttggccccgttcaggaccatctcgccgtacgtcaccggcacgtcggcttcggtgtcctccactttcaggaaggactgcaggaggcgctgtttgatcggggctgtggtgactagcaccccgtcgaccggccgcccgcgcgtgtcggcatgcgtcagacggggcacggccacggagggctgcgtggccgtggtgaggtccacgagccaggcctcgacggcctcccggcggtggcccgccttgcccaggaaaaagctcgtctcgcagaagcttcgctttagctcggcgaccagggtcgcccgggccaccctggtggccaggcggccgttgtccaggtatcgttgcatcggcaacaacaaagccaggggcggcgccttttccagcagcacgtgcagcatctggtcggccgtgccgcgctcaaacgccccgaggacggcctggacgttgcgagcgagctgttggatggcgcgcaactggcgatgcgcgctgatacccgtcccgtccagggcctcccccgtgagcagggcgatggcctcggtggccaggctgaaggcggcgttcagggcccggcggtcgataatcttggtcatgtaattgtgtgtgggttgctcgatggggtgcgggccgtcgcgggcaatcagcggctggtggacctcgaactgtacgcgcccctcgttcatgtaggccagctccggaaacttggtacacacgcacgccaccgacaacccgagctccagaaagcgcacgagcgacagggtgttgcaatacgaccccagcagggcgtcgaactcgacgtcgtacaggctgtttgcatcggagcgcacgcgggaaaaaaaatcgaacaggcgtcgatgcgacgccacctcgatcgtgctaaggagggacccggtcggcaccatggccgtggcataccggtatcccggagggtcgcggttgggagcggccatggggtcgcgtggagatcggctgtctctagcgatattggcccggggaggctaagatccaccccaacgcccggccacccgtgtacgtgcccgacggcccaaggtccaccgaaagacacgacggacccggacccaaagaggcgggggatgctgtgtgagaggccgggtgtcggtcgggggggaaaggcaccgggagaaggctgcggcctcgttccaggagaacccagtgtccccaacagacccggggacgtgggatccccggccttatatacccccccccgccccacccccgttagaacgcgacgggtgcattcaagatggccctggtccaaaagcgtgccaggaagaaattggcagaggcggcaaagctgtccgccgccgccacccacatcgaggccccggccgcacaggctatccccagggcccgtgtgcgcaggggatcggtgggtggcagcatttggttggtggcgataaagtggaaaagcccgtccggactgaaggtctcgtgggcggcggcgaacaaggcacacagggccgtgcctcccaaaaacacggacatcccccaaaacacgggcgccgacaacggcagacgatccctcttgatgttaacgtacaggaggagcgcccgcaccgcccacgtaacgtagtagccgacgatggcggccaggatacaggccggcgccaccacccttccggtcagcccgtaatacatgcccgctgccaccatctccaacggcttcaggaccaaaaacgaccaaaggaacagaatcacgcgctttgaaaagaccggctgggtatggggcggaagacgcgagtatgccgaactgacaaaaaaatcagaggtgccgtacgaggacaatgaaaactgttcctccagcggcagttctccctcctccatggtcatggggtgtgcggtggaggtggggagaccgaaaccgcaaagggtcgcttacgtcagcaggatcccgagatcaaagacacccgggttcttgcacaaacaccacccgggttgcatccgcggaggcgagtgttttgataaggccgttccgcgccttgatataacctttgatgttgaccacaaaacccggaatttacgcctacgccccaatgcccacgcaagatgaggtaggtaacccccccgtgggtgtgacgttgcgtttagttcattggaggccaaggggaaaaatggggtggggaggaaacggaaaacccagtaggccgtgtcgggaacacgcccggggttgtcctcaaaaggcagggtccatactacggaagccgtcgttgtattcgagacctgcctgtgcgacgcacgtcggggttgcctgtgtccggttcggcccccaccgcgtgcggcacgcacgaggacgagtccgcgtgctttattggcgttccaagcgttgccctccagtttctgttgtcggtgttcccccatacccacgcccacatccaccgtagggggcctctgggccgtgttacgtcgccgcccgcgatggagcttagctacgccaccaccatgcactaccgggacgttgtgttttacgtcacaacggaccgaaaccgggcctactttgtgtgcggggggtgtgtttattccgtggggcggccgtgtgcctcgcagcccggggagattgccaagtttggtctggtcgttcgagggacaggcccagacgaccgcgtggtcgccaactatgtacgaagcgaactccgacaacgcggcctgcaggacgtgcgtcccattggggaggacgaggtgtttctggacagcgtgtgtcttctaaacccgaacgtgagctccgagctggatgtgattaacacgaacgacgtggaagtgctggacgaatgtctggccgagtactgcacctcgctgcgaaccagcccgggtgtgctaatatccgggctgcgcgtgcgggcgcaagacagaatcatcgagttgtttgaacacccaacgatagtcaacgtttcctcgcactttgtgtataccccgtccccatacgtgttcgccctggcccaggcgcacctcccccggctcccgagctcgctggaggccctggtgagcggcctgtttgacggcatccccgccccacgccagccacttgacgcccacaacccgcgcacggatgtggttatcacgggccgccgcgccccacgacccatcgccgggtcgggggcggggtcggggggcgcgggcgccaagcgggccaccgtcagcgagttcgtgcaagtcaaacacattgaccgcgtgggccccgctggcgtttcgccggcgcctccgccaaacaacaccgactcgagttccctggtgcccggggcccaggattccgccccgcccggccccacgctaagggagctgtggtgggtgttttatgccgcagaccgggcgctggaggagccccgcgccgactctggcctcacccgcgaggaggtacgtgccgtacgtgggttccgggagcaggcgtggaaactgtttggctccgcgggggccccgcgggcgtttatcggggccgcgttgggcctgagccccctccaaaagctggccgtttactactatatcatccaccgagagaggcgcctgtcccccttccccgcgctagtccggctcgtaggccggtacacacagcgccacggcctgtacgtccctcggcccgacgacccagtcttggccgatgccatcaacgggctggttcgcgacgcgctggcggccggaaccacagccgagcagctcctcatgttcgaccttctccccccaaaggacgtgccggtgggaagcgacgtgcaggccgacagcaccgctctgctgcgctttatagaatcgcaacgtctcgccgtccccgggggggtgatctcccccgagcacgtcgcgtaccttggtgcgttcctgagcgtgctgtacgctggccgcgggcgcatgtccgcagcaacgcacaccgcgcggctgacaggggtgacctccctggtgctagcggtgggtgacgtggaccgtctttccgcgtttgaccgcggagcggcgggcgcggccagccgcacgcgggccgccgggtacctggatgtgcttctgaccgttcgtctcgctcgctccaaacacggacagtctgtgtaacagaccccaataaacgtatgtcgctaccacacccttgtgtgtcaatggacgcctctccgggggggaagggaaaacaaagaggggctgggggagcggcaccactggggcctgaacaaacaaacaaaccacagacacggttacagtttattcggtcgggcggataaacggccgaagccacgccccctttattcgcgtctccaaaaaaacgggacacttgtccggagaacctttaggatgccagccagggcggcggtaatcataaccacgcccagcgcagaggcggccagaaacccgggcgcaattgcggccacgggctgcgtgtcaaaggctagcaaatgaatgacggttccgtttggaaatagcaacaaggccgtggacggcacgtcgctcgaaaacacgctcggggcgccctccgtcggcccggcggcgatttgctgctgtgtgttgtccgtatccaccagcaacacagacatgacctccccggctggggtgtagcgcataaacacggcccccacgagccccaggtcgcgctggttttgggtgcgcaccagccgcttggactcgatatcccgggtggagccttcgcatgtcgcggtgaggtaggttaggaacagtgggcgtcggacgtcgacgccggtgagcttgtagccgatcccccggggcagaggggagtgggtgacgacgtagctggcgttgtgggtgatgggtaccaggatccgtggctcgacgttggcagactgccccccgcaccgatgtgaggcctcagggacgaaggcgcggatcagggcgttgtagtgtgcccagcgcgtcagggtcgaggcgaggccgtgggtctgctgggccaggacttcgaccggggtctcggatcgggtggcttgagccagcgcgtccaggataaacacgctctcgtctagatcaaagcgcagggaggccgcgcatggcgaaaagtggtccggaagccaaaagagggttttctggtggtcggcccgggccagcgcggtccggaggtcggcgttggtcgctgcggcgacgtcggacgtacacagggccgatgctatcagaaggctccggcgggcgcgttcccgctgcaccgccgaggggacgcccgccaagaacggctgccggaggacagccgaggcgtaaaatagcgcccggtggacgaccggggtggtcagcacgcggccccctagaaactcggcatacagggcgtcgatgagatgggctgcgctgggcgccactgcgtcgtacgccgaggggctatccagcacgaaggccagctgatagcccagcgcgtgtaatgccaagctctgttcgcgctccagaatctcggccaccaggtgctggagccgagcctctagctgcaggcgggccgtgggatccaagactgacacattaaaaaacacagaatccgcggcacagcccgcggccccgcgggcggccaacccggcaagcgcgcgcgagtgggccaaaaagcctagcaggtcggagaggcagaccgcgccgtttgcgtgggcggcgttcacgaaagcaaaacccgacgtcgcgagcagccccgttaggcgccagaagagaggggggcgcgggccctgctcggcgcccgcgtcccccgagaaaaactccgcgtatgcccgcgacaggaactgggcgtagttcgtgccctcctccgggtagccgcccacgcggcggagggcgtccagcgcggagccgttgtcggcccgcgtcagggaccctaggacaaagacccgataccgggggccgcccgggggcccgggaagagcccccggggggttttcgtccgcggggtccccgacccgatctagcgtctggcccgcggggaccaccatcacttccaccggagggctgtcgtgcatggatatcacgagccccatgaattcccgcccgtagcgcgcgcgcaccagcgcggcatcgcacccgagcaccagctcccccgtcgtccagatgcccacgggccacgtcgaggccgacggggagaaatacacgtacctacctggggatctcaacaggccccgggtggccaaccaggtcgtggacgcgttgtgcaggtgcgtgatgtccagctccgtcgtcgggtgccgccgggccccaaccggcggtcgggggggcggtgtatcacgcggcccgcttgggtggctcgccgtcgccacgttgtctccccgcgggaacgtcagggcctcggggtcagggacggccgaaaacgttacccaggcccgggaacgcagcaacacggaggcgactggattgtacaagagacccttaaggggggcgaccgaggggggaggctgggcggtcggctcgaccgtggtgggggcgggcaggctcgcgttcgggggccggccgagcaggtaggtcttcgggatgtaaagcagctggccggggtcccgcggaaactcggccgtggtgaccaatacaaaacaaaagcgctcctcgtaccagcgaagaaggggcagagatgccgtagtcaggtttagttcgtccggcggcgccagaaatccgcgcggtggtttttgggggtcgggggtgtttggcagccacagacgcccggtgttcgtgtcgcgccagtacatgcggtccatgcccaggccatccaaaaaccatgggtctgtctgctcagtccagtcgtggacctgaccccacgcaacgcccaaaataataacccccacgaaccataaaccattccccatgggggaccccgtccctaacccacggggcccgtggctatggcagggcttgccgccccgacgttggctgcgagccctgggccttcacccgaacttggggggtggggtggggaaaaggaagaaacgcgggcgtattggccccaatggggtctcggtggggtatcgacagagtgccagccctgggaccgaaccccgcgtttatgaacaaacgacccaacacccgtgcgttttattctgtctttttattgccgtcatagcgcgggttccttccggtattgtctccttccgtgtttcagttagcctcccccatctcccgggcaaacgtgcgcgccaggtcgcagatcgtcggtatggagccgggggtggtgacgtgggtctggaccatcccggaggtaagttgcagcagggcgtcccggcagccggcgggcgattggtcgtaatccaggataaagacgtgcatgggacggaggcgtttggccaagacgtccaaggcccaggcaaacacgttgtacaggtcgccgttgggggccagcaactcgggggcccgaaacagggtaaataacgtgtccccgatatggggtcgtgggcccgcgttgctctggggctcggcaccctggggcggcacggccgtccccgaaagctgtccccaatcctcccgccacgacccgccgccctgcagataccgcaccgtattggcaagcagcccgtaaacgcggcgaatcgcggccagcatagccaggtcaagccgctcgccggggcgctggcgtttggccaggcggtcgatgtgtctgtcctccggaagggcccccaacacgatgtttgtgccgggcaaggtcggcgggatgagggccacgaacgccagcacggcctggggggtcatgctgcccataaggtatcgcgcggccgggtagcacaggagggcggcgatgggatggcggtcgaagatgagggtgagggccgggggcggggcatgtgagctcccagcctcccccccgatatgaggagccagaacggcgtcggtcacggcataaggcatgcccattgttatctgggcgcttgtcattaccaccgccgcgtccccggccgatatctcaccctggtcgaggcggtgttgtgtggtgtagatgttcgcgattgtctcggaagcccccagcacctgccagtaagtcatcggctcgggtacgtagacgatatcgtcgcgcgaacccagggccaccagcagttgcgtggtggtggttttccccatcccgtgaggaccctctatataaacccgcagtagcgtgggcattttctgctccaggcggacttccgtggcttcttgctgccggcgagggcgcaacgccgtacgtcggttgctatggccgcgagaacgcgcagcctggtcgaacgcagacgcgtattgatggcaggggtacgaagccatacgcgcttctacaaggcgcttgccgaagaggtgcgggagtttcacgccaccaagatctgcggcacgctgttgacgctgttaagcgggtcgctgcagggtcgctcggtgttcgaggccacacgcgtcaccttaatatgcgaagtggacctgggaccgcgccgccccgactgcatctgcgtgttcgaattcgtgaatgacaagacgctgggcggggtttgtgtcatcatagaactaaagacatgcaaatatatttcttccggggacaccgccagcaaacgcgagcaacgggccacggggatgaagcagctgcgccactccctgaagctcctgcagtccctcgcgcctccgggtgacaagatagtgtacctgtgccccgtcctggtgtttgtcgcccaacggacgctccgcgtcagccgcgtgacccggctcgtcccgcagaaggtctccggtaatatcaccgcagtcgtgcggatgctccagagcctgtccacgtatacggtccccatggagcctaggacccagcgagcccgtcgccgccgcggcggcgccgcccgggggtctgcgagcagaccgaaaaggtcacactctggggcgcgcgacccgcccgagtcagcggcccgccagttaccacccgccgaccaaacccccgcctccacggagggcgggggggtgcttaagaggatcgcggcgctcttctgcgtgcccgtggccaccaagaccaaaccccgagccgcctccgaatgagagtgtttcgttccttccccctccccccgcgtcagacaaaccctaaccaccgcttaagcggcccccgcgaggtccgaagactcatttggatccggcgggagccacccgacaacagcccccgggttttcccacgccagacgccggtccgctgtgccatcgcgccccctcatcccaccccccatcttgtccccaaataaaacaaggtctggtagttaggacaacgaccgcagttctcgtgtgttattttcgctctccgcctctcgcagatggacccgtactgcccatttgacgctctggacgtctgggaacacaggcgcttcatagtcgccgattcccgaaacttcatcacccccgagttcccccgggacttttggatgtcgcccgtctttaacctcccccgggagacggcggcggagcaggtggtcgtcctacaggcccagcgcacagcggctgccgctgccctggagaacgccgccatgcaggcggccgagctccccgtcgatatcgagcgccggttacgcccgatcgaacggaacgtgcacaagatcgcaggcgccctggaggcgctggagacggcggcggccgccgccgaagaggcggatgccgcgcgcggggatgagccggcgggtgggggcgacgggggggcgcccccgagtctggccgtcgcggagatggaggtccagatcgtgcgcaacgacccgccgctacgatacgacaccaacctccccgtggatctgctacacatggtgtacgcgggccgcggggcgaccggatcgtcgggggtggtgttcgggacctggtaccgcactatccaggaccgcaccatcacggactttcccctgaccacccgcagtgccgactttcgggacggccgtatgtccaagaccttcatgacggcgctggtactgtccctgcagtcgtgcggccggctgtatgtgggccagcgccactattccgccttcgagtgcgccgtgttgtgtctctacctgctgtaccgaaacacgcacggggccgccgacgatagcgaccgcgctccggtcacgttcggggatctgctgggccggctgccccgctacctggcgtgcctggccgcggtgatcgggaccgagggcggccggccacagtaccgctaccgcgacgacaagctccccaagacgcagttcgcggccggcgggggccgctacgaacacggagcgctggcgtcgcacatcgtgatcgccacgctgatgcaccacggggtgctcccggcggccccgggggacgtcccccgggacgcgagcacccacgttaaccccgacggcgtggcgcaccacgacgacataaaccgcgccgccgccgcgttcctcagccggggccacaacctattcctgtgggaggaccagactctgctgcgggcaaccgcgaacaccataacggccctgggcgttatccagcggctcctcgcgaacggcaacgtgtacgcggaccgcctcaacaaccgcctgcagctgggcatgctgatccccggagccgtcccttcggaggccatcgcccgtggggcctccgggtccgactcgggggccatcaagagcggagacaacaatctggaggcgctatgtgccaattacgtgcttccgctgtaccgggccgacccggcggtcgagctgacccagctgtttcccggcctggccgccctgtgtcttgacgcccaggcggggcggccggtcgggtcgacgcggcgggtggtggatatgtcatcgggggcccgccaggcggcgctggtgcgcctcaccgccctggaactcatcaaccgcacccgcacaaaccccacccccgtgggggaggttatccacgcccacgacgccctggcgatccaatacgaacaggggcttggcctgctggcgcagcaggcacgcattggcttgggctccaacaccaagcgtttctccgcgttcaacgttagcagcgactacgacatgttgtactttttatgtctggggttcattccacagtacctgtcggcggtttagtgggtggtgggcgaggggggagggggcattagggagaaagaacaagagcctccgttgggttttctttgtgcctgtactcaaaaggtcataccccgtaaacggcgggctccagtcccggcccggcggttggcgtgaacgcaacggcgggagctgggttagcgtttagtttagcattcgctctcgcctttccgcccgccccccgaccgttgcgccttttttttttttcgtccaccaaagtctctgtgggtgcgcgcatggcagccgatgccccgggagaccggatggaggagcccctgccagacagggccgtgcccatttacgtggctgggtttttggccctgtatgacagcggggactcgggcgagttggcattggatccggatacggtgcgtgcggccctgcctccggataacccactcccgattaacgtggaccaccgcgctggctgcgaggtggggcgggtgctggccgtggtcgacgacccccgcgggccgttttttgtgggactgatcgcctgcgtgcaactggagcgcgtcctcgagacggccgccagcgctgcgattttcgagcgccgcgggccgccgctctcccgggaggagcgcctgttgtacctgatcaccaactacctgccctcggtctccctggccacaaaacgcctggggggcgaggcgcaccccgatcgcacgctgttcgcgcacgtcgcgctgtgcgcgatcgggcggcgcctcggcactatcgtcacctacgacaccggtctcgacgccgccatcgcgccctttcgccacctgtcgccggcgtctcgcgagggggcgcggcgactggccgccgaggccgagctcgcgctgtccggacgcacctgggcgcccggcgtggaggcgctgacccacacgctgctttccaccgccgttaacaacatgatgctgcgggaccgctggagcctggtggccgagcggcggcggcaggccgggatcgccggacacacctacctccaggcgagcgaaaaattcaaaatgtggggggcggagcctgtttccgcgccggcgcgcgggtataagaacggggccccggagtccacggacataccgcccggctcgatcgctgccgcgccgcagggtgaccggtgcccaatcgtccgtcagcgcggggtcgcctcgcccccggtactgccccccatgaaccccgttccggcatcgggcaccccggcccccgcgccgcccggcgacgggagctacctgtggatcccggcctcccattacaaccagctcgtcgccggccacgccgcgccccaaccccagccgcattccgcgtttggtttcccggctgcggcgggggccgtggcctatgggcctcacggcgcgggtctttcccagcattaccctccccacgtcgcccatcagtatcccggggtgctgttctcgggacccagcccactcgaggcgcagatagccgcgttggtgggggccatagccgcggaccgccaggcgggcggtcagacggccgcgggagaccctggggtccgggggtcgggaaagcgtcgccggtacgaggcggggccgtcggagtcctactgcgaccaggacgaaccggacgcggactacccgtactaccccggggaggctcgaggcgggccgcgcggggtcgactctcggcgcgcggcccgccagtctcccgggaccaacgagaccatcacggcgctgatgggggcggtgacgtctctgcagcaggaactggcgcacatgcgggctcggaccagcgccccctatggaatgtacacgccggtggcgcactatcgccctcaggtgggggagccggaaccaacaacgacccacccggccctttgtcccccggaggccgtgtatcgccccccaccacacagcgccccctacggtcctccccagggtccggcgtcccatgcccccactcccccgtatgccccagctgcctgcccgccaggcccgccaccgcccccatgtccttccacccagacgcgcgcccctctaccgacggagcccgcgttcccccccgccgccaccggatcccaaccggaggcatccaacgcggaggccggggcccttgtcaacgccagcagcgcagcacacgtggacgttgacacggcccgcgccgccgatttgttcgtctctcagatgatgggggcccgctgattcgccccggtctttggtaccatgggatgtcttactgtatatctttttaaataaaccaggtaataccaaataagacccattggtgtatgttctttttttattgggaggcgcgggtaggcgggtagctttacaatgcaaaagccttcgacgtggaggaaggcgtggggggggaatcggcactgaccaagggggtccgttttgtcacgggaaaggaaagaggaaacaggccgcggacacccgggggagtttatgtgttcccttttctttcttcccacacacacaaaaggcgtaccaaacaaacaaaccaaaagatgcacatgcggtttaacacccgtggtttttatttacaacaaaccccccgtcacaggtcgtcctcgtcggcgtcaccgtctttgttgggaacttgggtgtagttggtgttgcggcgcttgcgcatgaccatgtcggtgaccttggcgctgagcagcgcgctcgtgcccttcttcttggccttgtgttccgtgcgctccatggcagacaccagggccatgtaccgtatcatctcccgggcctcggctagcttggcctcgtcaaagtcgccgccctcctcgccctccccggacgcgtccgggttggtggggttcttgagctccttggtggttagcgggtacagggccttcatggggttgctctgcagccgcatgacgtagcgaaaggcgaagaaagccgccgccaggccggccaggaccaacagacccacggccagcgccccaaaggggttggacatgaaggaggacacgcccgacacggccgataccacgccgcccacgatgcccatcaccaccttgccgaccgcgcgccccaggtcgcccatcccctcgaagaacgcgcccaggcccgcgaacatggcggcgttggcgtcggcgtggatgaccgtgtcgatgtcggcgaagcgcaggtcgtgcagctggttgcggcgctggacctccgtgtagtccagcaggccgctgtccttgatctcgtgtcgggtgtacacctccagggggacaaactcgtgatcctccagcatggtgatgttgaggtcgatgaaggtgctgacggtggtgatgtcggcgcggctcagctggtgggagtacgcgtactcctcgaagtacacgtagcccccgccgaaggtgaagtagcgccggtgtcccacggtgcacggctcgatcgcatcgcgcgtcagccgcagctcgttgttctcccccagctgcccctcgaccaacgggccctggtcttcgtaccgaaagctgaccagggggcggctgtagcaggccccgggccgcgagctgatgcgcatcgagttttggacgatcacgttgtccgcggcgaccggcacgcacgtggagacggccatcacgtcgccgagcatccgcgcgctcacccgccggcccacggtggccgaggcgatggcgttggggttcagcttgcgggcctcgttccacagggtcagctcgtgattctgcagctcgcaccacgcgatggcaacgcggcccaacatatcgttgacatggcgctgtatgtggttgtacgtaaactgcagccgggcgaactcgatggaggaggtggtcttgatgcgctccacggacgcgttggcgctggccccgggcggcgggggcgtggggtttgggggcttgcggctctgctctcggaggtgttcccgcacgtacagctccgcgagcgtgttgctgagaaggggctggtacgcgatcagaaagcccccattggccaggtagtactgcggctggcccaccttgatgtgcgtcgcgttgtacctgcgggcgaagatgcggtccatggcgtcgcgggcgtccttgccgatgcagtcccccaggtccacgcgcgagagcgggtactcggtcaggttggtggtgaaggtggtggatatggcgtcggaggagaatcggaaggagccgccgtactcggagcgcagcatctcgtccacctcctgccacttggtcatggtgcagaccgacgggcgctttggcacccagtcccaggccacggtgaacttgggggtcgtgagcaggttccgggtggtcggcgccgtggcccgggccttggtggtgaggtcgcgcgcgtagaagccgtcaacctgcttgaagcggtcggcggcgtagctggtgtgttcggtgtgcgacccctcccggtagccgtaaaacggggacatgtacacaaagtcgccagtcgccagcacaaactcgtcgtacgggtacaccgagcgcgcgtccacctcctcgacgatgcagtttaccgtcgtcccgtaccggtggaacgcctccacccgcgaggggttgtacttgaggtcggtggtgtgccagccccggctcgtgcgggtcgcggcgttggccggtttcagctccatgtcggtctcgtggtcgtcccggtgaaacgcggtggtctccaggttgttgcgcacgtacttggccgtggaccgacagacccccttggcgttgatcttgtcgatcacctcctcgaaggggacgggggcgcggtcctcaaagatccccataaactgggagtagcggtggccgaaccacacctgcgaaacggtgacgtctttgtagtacatggtggccttgaacttgtacggggcgatgttctccttgaagaccaccgcgatgccctccgtgtagttctgaccctcgggccgggtcgggcagcggcgcggctgctcgaactgcaccaccgtggcgcccgtggggggtgggcacacgtaaaagtttgcatcggtgttctccgccttgatgtcccgcaggtgctcgcgcagggtggcgtggcccgcggcgacggtcgcgttgtcgccggcggggcgcggcggcggtgggtttttcggttttttgttcttcttcggtttcgtgtcccccgttggggcggggccaggggcgggcggcgccggagtggcaggtcccccgttcgccgcctgggtcgcggccgcgaccccaggcgtgccgggggaactcggagccgccgacgccaccaggacccccagcgtcaaccccaagagcgcccatacgacgaaccaccggcacccccgcgcgggggcgccctggcgcatggcgggactacgggggcccgtcgtgccccccgtcaggtagcctgggggcgaggtgctggaggaccgagtagaggatcgagaaaacgtctcggtcgtagaccacgaccgaccgggggccgatacagccgtcgggggcgctctcgacgatggccaccagcggacagtcggagtcgtacgtgagatatacgccgggcgggtaacggtaacgaccttcggaggtcgggcggctgcagtccgggcggcgcaactcgagctccccgcaccggtagaccgaggcaaagagtgtggtggcgataatcagctcgcgaatatatcgccaggcggcgcgctgagtgggcgttattccggaaatgccgtcaaaacagtaaaacctctgaaattcgctgacggcccaatcagcacccgagccccccgcccccatgatgaaccgggcgagctcctccttcaggtgcggcaggagccccacgttctcgacgctgtaatacagcgcggtgttggggggctgggcgaagctgtgggtggagtgatcaaagaggggcccgttgacgagctcgaagaagcgatgggtgatgctggggagcagggccgggtccacctggtgtcgcaggagagacgctcgcatgaaccggtgcgcgtcgaacacgcccggcgccgagcggttgtcgatgaccgtgcccgcgcccgccgtcagggcgcagaagcgcgcgcgcgccgcaaagccgttggcgaccgcggcgaacgtcgcgggcagcacctcgccgtggacgctgacccgcagcatcttctcgagctccccgcgctgctcgcggacgcagcgccccaggctggccaacgaccgcttcgtcaggcggtccgcgtacagccgccgtcgctcccgcacgtccgcggccgcttgcgtggcgatgtccccccacgtctcgggcccctgccccccgggcccgcggcgacggtcttcgtcctcgcccccgcccccgggagctcccaacccccgtgccccttcctctacggcgacacggtccccgtcgtcgtcggggcccgcgccgcccttgggcgcgtccgccgcgccccccgcccccatgcgcgccagcacgcgacgcagcgcctcctcgtcgcactgttcggggctgacgaggcgccgcaagagcggcgtcgtcaggtggtggtcgtagcacgcgcggatgagcgcctcgatctgatcgtcgggtgacgtggcctgaccgccgattattagggcgtccaccatatccagcgccgccaggtggctcccgaacgcgcgatcgaaatgctccgcccgccgcccgaacagcgccagttccacggccaccgcggcggtctcctgctgcaactcgcgccgcgccagcgcggtcaggttgctggcaaacgcgtccatggtggtctggccggcgcggtcgccggacgcgagccagaatcgcaattcgctgatggcgtacaggccgggcgtggtggcctgaaacacgtcgtgcgcctccagcagggcgtcggcctccttgcggaccgagtcgttctcgggcgacgggtggggctgcccgtcgccccccgcggtccgggccagcgcatggtccaacacggagagcgcccgcgcgcggtcggcgtccgacagcccggcggcgtggggcaggtaccgccgcagctcgttggcgtccagccgcacctgcgcctgctgggtgacgtggttacagatacggtccgccaggcggcgggcgatcgtcgccccctggttcgccgtcacacacagttcctcgaaacagaccgcgcaggggtgggacgggtcgctaagctccggggggacgataaggcccgaccccaccgcccccaccataaactcccgaacgcgctccagcgcggcggtggcgccgcgcgagggggtgatgaggtggcagtagtttagctgctttagaaagttctcgacgtcgtgcaggaaacacagctccatatggacggtcccgccatacgtatccagcctgacccgttggtgatacggacagggtcgggccaggcccatggtctccgtgaaaaacaccgcgacgtctcccgcggtcgcgaacgtctccaggctgcccaggagccgctcgccctcgcgccacgcgtactctagcagcaactccagggtgaccgacagcggggtgagaaaggccccggcctgggcctccaggcccggcctcagacgacgccgcagcgcccgcacctgaagcgcgttcagcttcagttgggggagcttcccccgtccgatgtgggggtcgcaccgccggagcagctctatctgaaacacataggtctgcacctgtccgagcagggctaacaacttttgacgggccacggtgggctcggacaccggggcggccatctcgcggcgccgatctgtaccgcggccggagtatgcggtggaccgaggcggtccgtacgctacccggcgtctggctgagccccggggtccccctattcggggcggcctcccgcgggcccgccgaccggcaagccgggagtcggcggcgcgtgcgtttctgttctattcccagacaccgcggagaggaatcacggcccgcccagagatatagacacggaacacaaacaagcacggatgtcgtagcaataatttattttacacacattccccgccccgccctaggttcccccaccccccaacccctcacagcatatccaacgtcaggtctccctttttgtcggggggcccctccccaaacgggtcatccccgtggaacgcccgtttgcggccggcaaatgccggtcccggggcccccgggccgccgaacggcgtcgcgttgtcgtcctcgcagccaaaatccccaaagttaaacacctccccggcgttgccgagttggctgactagggcctcggcctcgtgcgccacctccagggccgcgtccgtcgaccactcgccgttgccgcgctccagggcacgtgcggtcagctccatcatctcctcgcttaggtactcgtcctccaggagcgccagccagtcctcgatctgcagctgttgggtgcggggccccaggcttttcacggtcgccacgaacacgctactggcgacggccgccccgccctcggagataatgccccggagctgctcgcacagcgagctttcgtgcgctccgccgccgaggctcgaggccgcgcacacaaacccggcccggggacaggccaggacgaacttgcgggtgcggtcaaaaataaggagcgggcacgcgtttttgccgcccatcaggctggcccagttcccggcctgaaacacacggtcgttgccggccatgccgtagtatttgctgatgctcaaccccaacacgaccatggggcgtgccgccatgacgggccgcagcaggttgcagctggcgaacatggaggtccacgcgcccggatgcgcgtccacggcgtccatcagcgcgcgggccccggcctccaggcccgccccgccctgcgcggaccacgcggccgccgcctgcacgctggggggacggcgggaccccgcgatgatggccgtgagggtgttgatgaagtacgtcgagtgatcgcagtaccgcagaatctggtttgccatgtagtacatcgccagctcgctcacgttgttgggggccaggttaataaagttgatcgcgccgtagtccagggaaaactttttaatgaacgcgatggtctcgatgtcctcgcgcgacaggagccgggcgggaagctggttgcgttggagggccgtccagaaccactgcgggttcggctggttggaccccgggggcttgccgttggggaagatggccgcgtggaactgcttcagcagaaagcccagcggtccgaggaggatgtccacgcgcttgtcgggcttctggtaggcgctctggaggctggcgacccgcgccttggcggcctcggacgcgttggcgctcgcgcccgcgaacaacacgcggctcttgacgcgcagctccttgggaaaccccagggtcacgcgggcaacgtcgccctcgaagctgctctcggcgggggccgtctggccggccgtcaggctgggggcgcagatagccgcaccctccgagagcgcgaccgtcagcgttttggccgacagaaacccgttgttaaacatgtccatcacgcgccgccgcagcaccggttggaattgattgcgaaagttgcgcccctcgaccgactgcccggcgaacaccccgtggcactggctcagggccaggtcctggtacacggcgaggttggatcgccgcccgagaagctgaagcagggggcacggcccgcacgcgtacgggtccagcgtcagggacatggcgtggttggcctcgcccagaccgtcgcgaaacttgaagttcctcccctccaccaggttgcgcatcagctgctccacctcgcggtccacgacctgcctgacgttgttcaccaccgtatgcagggcctcgcggttggtgatgatggtctccagccgccccatggccgtggggaccgcctggtccacgtactgcagggtctcgagttcggccatgacgcgctcggtcgccgcgcggtacgtctcctgcatgatggtccgggcggtctcggatccgtccgcgcgcttcagggccgagaaggcggcgtagtttcccagcacgtcgcagtcgctgtacatgctgttcatggtcccgaagacgccgatggctccgcgggcggcgctggcgaacttgggatggcgcgcccggaggcgcatgagcgtcgtgtgtacgcaggcgtggcgcgtgtcgaaggtgcacaggttacagggcacgtcggtctggttggagtccgcgacgtatcgaaacacgtccatctcctggcgcccgacgatcacgccgccgtcgcagcgctccaggtaaaacagcatcttggccagcagcgccggggaaaacccacacagcatggccaggtgctcgccggcaaattcctgggttccgccgacgaggggcgcggtgggccgaccctcgaacccgggcaccacgtgtccctcgcggtccacctgtgggttggccgccacgtgggtcccgggcacgaggaagaagcggtaaaaggagggtttgctgtggtcctttgggtccgccgggccggcgtcgtccacctcggtgagatggagggccgagttggtgctaaataccatggcccccacgagtcccgcggcgcgcgccaggtacgccccgacggcgttggcgcgggccgcggccgtgtcctggccctcgaacagcggccacgcggagatgtcggtgggcggctcgtcaaagacggccatcgacacgatagactcgagggccagggcggcgtctccggccatgacggaggccaggcgctgttcgaacccgcccgcagggcccttgccgccgccgtcgcgcccgccccgcggggtcttaccctggctggcttcgaaggccgtgaacgtaatgtcggcggggagggcggcgccctcgtggttttcgtcaaacgccaggtgggcggccgcgcgggccacggcgtccacgtttcggcatcgcagtgccacggcggcgggtcccacgaccgcctcgaacaggaggcggtggagggggcggttaaaaaacggaagcgggtaggtaaaattctccccgatcgatcggtggttggcgttgaacggctctgcgatgacacggctaaaatccggcatgaacagctgcaacgggtacacgggtatgcggtgcacctccgccccgcctatggttaccttgtccgagcctcccaggtgcagaaaggtgttgttgatgcacacggcctccttgaagccctcggtaacgaccagatacaggagggcgcggtccgggtccaggccgaggcgctcacacagcgcctcccccgtcgtctcgtgtttgaggtcgccgggccggggggtgtagtccgaaaagccaaaatggcggcgtgcccgctcgcagagtcgcgtcaggttcggggcctgggtgctggggtccaggtgccggccgccgtgaaagacgtacacggacgagctgtagtgcgagggcgtcagtttcagggacaccgcggtacccccgagccccgtcgtgcgagaacccacgaccacggccacgttggcctcaaagccgctctccacggtcaggcccacgaccaggggcgccacggcgacgtcggcatcgccgctgcgcgccgacagtaacgccagaagctcgatgccttcggacggacacgcgcgagcgtacacgtatcccaggggcccgggggggaccttgatggtggttgccgtcttgggctttgtctccatgtccttctgtcaatcggtccgcgaacggaggtaatcccggcacgacgacggacgcccgacaaggtatgtctcccgagcgtcaaaatccgggggggggggcggcgacggtcaaggggagggttggagaccggggttggggaatgaatccctacccttcaccgacaaccccccgggtaatcacggggtgccgatgaaccccggcggccggcaacgcggggtccctgcgagaggcacagatgcttacggtcaggtgctccgggtcgggtgcgtctggtatgcggttggtatatgtacactttacctgggggcgtgcctggccgccccagcccctcccacgccctgcgcgtcatcagccggtgggcgtggccgctattataaaaaaagtgagaacgcgaagcgttcgcactttgtcctaataatatatatattattaggacaaagtgcgaacgcttcgcgttctcactttttttataatagcggccacgcccaccggctacgtcacgctcctgtcggccgccggcggtccataagcccggccggccgggccgacgcgaataaaccgggccgccggccggggcgccgcgcagcagctcgccgcccggatccgccagacaaacaaggcccttgcacatgccggcccgggcgagcctgggggtccggtaattttgccatcccacccaagcggctttttgggtttttctcttcccccctccccacatcccccctctttaggggttcgggtggtaacaaccgcgatgttttccggtggcggcggcccgctgtcccccggaggaaagtcggcggccagggcggcgtccgggttttttgcgcccgccggccctcgcggagccggccggggacccccgccttgcttgaggcaaaacttttacaacccctacctcgccccagtcgggacgcaacagaagccgaccgggccaacccagcgccatacgtactatagcgaatgcgatgaatttcgattcatcgccccgcgggtgctggacgaggatgcccccccggagaagcgcgccggggtgcacgacggtcacctcaagcgcgcccccaaggtgtactgcgggggggacgagcgcgacgtcctccgcgtcgggtcgggcggcttctggccgcggcgctcgcgcctgtggggcggcgtggaccacgccccggcggggttcaaccccaccgtcaccgtctttcacgtgtacgacatcctggagaacgtggagcacgcgtacggcatgcgcgcggcccagttccacgcgcggtttatggacgccatcacaccgacggggaccgtcatcacgctcctgggcctgactccggaaggccaccgggtggccgttcacgtttacggcacgcggcagtacttttacatgaacaaggaggaggtcgacaggcacctacaatgccgcgccccacgagatctctgcgagcgcatggccgcggccctgcgcgagtccccgggcgcgtcgttccgcggcatttccgcggaccacttcgaggcggaggtggtggagcgcaccgacgtgtactactacgagacgcgccccgctctgttttaccgcgtctacgtccgaagcgggcgcgtgctgtcgtacctgtgcgacaacttctgcccggccatcaagaagtacgagggtggggtcgacgccaccacccggttcatcctggacaaccccgggttcgtcaccttcggctggtaccgtctcaaaccgggccggaacaacacgctagcccagccgcgggccccgatggccttcgggacatccagcgacgtcgagtttaactgtacggcggacaacctggccatcgaggggggcatgagcgacctaccggcatacaagctcatgtgcttcgatatcgaatgcaaggcggggggggaggacgagctggcctttccggtggccgggcacccggaggacctggtcatccagatatcctgtctgctctacgacctgtccaccaccgccctggagcacgtcctcctgttttcgctcggttcctgcgacctccccgaatcccacctgaacgagctggcggccaggggcctgcccacgcccgtggttctggaattcgacagcgaattcgagatgctgttggccttcatgacccttgtgaaacagtacggccccgagttcgtgaccgggtacaacatcatcaacttcgactggcccttcttgctggccaagctgacggacatttacaaggtccccctggacgggtacggccgcatgaacggccggggcgtgtttcgcgtgtgggacataggccagagccacttccagaagcgcagcaagataaaggtgaacggcatggtgaacatcgacatgtacgggattataaccgacaagatcaagctctcgagctacaagctcaacgccgtggccgaagccgtcctgaaggacaagaagaaggacctgagctatcgcgacatccccgcctactacgccgccgggcccgcgcaacgcggggtgatcggcgagtactgcatacaggattccctgctggtgggccagctgttttttaagtttttgccccatctggagctctcggccgtcgcgcgcttggcgggtattaacatcacccgcaccatctacgacggccagcagatccgcgtctttacgtgcctgctgcgcctggccgaccagaagggctttattctgccggacacccaggggcgatttaggggcgccgggggggaggcgcccaagcgtccggccgcagcccgggaggacgaggagcggccagaggaggagggggaggacgaggacgaacgcgaggagggcgggggcgagcgggagccggagggcgcgcgggagaccgccggccggcacgtggggtaccagggggccagggtccttgaccccacttccgggtttcatgtgaaccccgtggtggtgttcgactttgccagcctgtaccccagcatcatccaggcccacaacctgtgcttcagcacgctctccctgagggccgacgcagtggcgcacctggaggcgggcaaggactacctggagatcgaggtgggggggcgacggctgttcttcgtcaaggctcacgtgcgagagagcctcctcagcatcctcctgcgggactggctcgccatgcgaaagcagatccgctcgcggattccccagagcagccccgaggaggccgtgctcctggacaagcagcaggccgccatcaaggtcgtgtgtaactcggtttacgggttcacgggagtgcagcacggactcctgccgtgcctgcacgttgccgcgacggtgacgaccatcggccgcgagatgctgctcgcgacccgcgagtacgtccacgcgcgctgggcggccttcgaacagctcctggccgatttcccggaggcggccgacatgcgcgcccccgggccctattccatgcgcatcatctacggggacacggactccatctttgtgctgtgccgcggcctcacggccgccgggctgacggccgtgggcgacaagatggcgagccacatctcgcgcgcgctgtttctgtcccccatcaaactcgagtgcgaaaagacgttcaccaagctgctgctgatcgccaagaaaaagtacatcggcgtcatctacgggggtaagatgctcatcaagggcgtggatctggtgcgcaaaaacaactgcgcgtttatcaaccgcacctccagggccctggtcgacctgctgttttacgacgataccgtatccggagcggccgccgcgttagccgagcgccccgcagaggagtggctggcgcgacccctgcccgagggactgcaggcgttcggggccgtcctcgtagacgcccatcggcgcatcaccgacccggagagggacatccaggactttgtcctcaccgccgaactgagcagacacccgcgcgcgtacaccaacaagcgcctggcccacctgacggtgtattacaagctcatggcccgccgcgcgcaggtcccgtccatcaaggaccggatcccgtacgtgatcgtggcccagacccgcgaggtagaggagacggtcgcgcggctggccgccctccgcgagctcgacgccgccgccccaggggacgagcccgccccccccgcggccctgccctccccggccaagcgcccccgggagacgccgttgcatgccgaccccccgggaggcgcgtccaagccccgcaagctgctggtgtccgagctggccgaggatcccgcatacgccattgcccacggcgtcgccctgaacacggactattacttctcccacctgttgggggcggcgtgcgtgacattcaaggccctgtttgggaataacgccaagatcaccgagagtctgttaaaaaggtttattcccgaagtgtggcaccccccggacgacgtggccgcgcggctccgggccgcagggttcggggcggtgggtgccggcgctacggcggaggaaactcgtcgaatgttgcatagagcctttgatactctagcatgagccccccgtcgaagctgatgtccctcattttacaataaatgtctgcggccgacacggtcggaatctccgcgtccgtgggtttctctgcgttgcgccggaccacgagcacaaacgtgctctgccacacgtgggcgacgaaccggtaccccgggcacgcggtgagcatccggtctatgagccggtagtgcaggtgggcggacgtgccgggaaagatgacgtacagcatgtggcccccgtaagtggggtccgggtaaaacaacagccgcgggtcgcacgccccgcctccgcgcaggatcgtgtggacgaaaaaaagctcgggttggccaagaatcccggccaagaggtcctggaggggggcgttgtggcggtcggccaacacgaccaaggaggccaggaaggcgcgatgctcgaatatcgtgttgatctgctgcacgaaggccaggattagggcctcgcggctggtggcggcgaaccgcccgtctcccgcgttgcacgcgggacagcaacccccgatgcctaggtagtagcccatcccggagagggtcaggcagttgtcggccacggtctggtccagacagaagggcagcgagacgggagtggtcttcaccaggggcaccgagagcgagcgcacgatggcgatctcctcggagggcgtctgggcgagggcggcgaaaaggccccgatagcgctggcgctcgtgtaaacacagctcctgtttgcgggcgtgaggcggcaggctcttccgggaggcccgacgcaccacgcccagagtcccgccggccgcagaggagcgcgaccgccggcgctccttgccgtgatagggcccgggccgggagccgcggcgatgggggtcggtgtcatacataggtacacagggtgtgctccagggacaggagcgagatcgagtggcgtctaagcagcgcgcccgcctcacggacaaatgtggcgagcgcggtgggctttggtacaaatacctgatacgtcttgaaggtgtagatgagggcacgcaacgctatgcagacacgcccctcgaactcgttcccgcaggccagcttggccttgtggagcagcagctcgtcgggatgggtggcggggggatggccgaacagaacccaggggtcaacctccatctccgtaatggcgcacatggggtcacagaacatgtgcttaaagatggcctcgggccccgcggcccgaagcaggctcacaaaccggcccccgtccccgggctgcgtctcggggtcagcctcgagctggtcgacgacgggtacgatacagtcgaagaggctcgtgttgttttccgagtagcggaccacggaggcccggagtctgcgcagggccagccagtaagcacgcaccagtaacaggttacacagcaggcattctccgccggtgcgcccgcgcccccggccgtgtttcagcacggtggccatcagagggcccaggtcgaggtcgggctgggcatcgggttcggtaaactgcgcaaagcgcggagccacgtcgcgcgtgcgtgccccgcgatgcgcttcccaggactggcggaccgtggcgcgacgggcctccgcggcagcgcgcagctggggccccgactcccagacggcgggggtgccggcgaggagcagcaggaccagatccgcgtacgcccacgtatccggcgactcctccggctcgcggtccccggcgaccgtctcgaattccccgttgcgagcggcggcgcgcgtacagcagctgtccccgcccccgcgccgaccctccgtgcagtccaggagacgggcgcaatccttccagttcatcagcgcggtggtgagcgacggctgcgtgccggatcccgccgaccccgccccctcctcgcccccggaggccaaggttccgatgagggcccgggtggcagactgcgccaggaacgagtagttggagtactgcaccttggcggctcccggggagggcgagggcttgggttgcttctgggcatgccgcccgggcaccccgccgtcggtacggaagcagcagtggagaaaaaagtgccggtggatgtcgtttatggtgagggcaaagcgtgcgaaggagccgaccagggtcgccttcttggtgcgcagaaagtggcggtccatgacgtacacaaactcgaacgcggccacgaagatgctagcggcgcagtggggcgcccccaggcatttggcacagagaaacgcgtaatcggccacccactgaggcgagaggcggtaggtttgcttgtacagctcgatggtgcggcagaccagacagggccggtccagcgcgaaggtgtcgatggccgccgcggaaaagggcccggtgtccaaaagcccctccccacagggatccgggggcgggttgcggggtcctccgcgcccgcccgaaccccctccgtcgcccgcccccccgcgggcccttgagggggcggtgaccacgtcggcggcgacgtcctcgtcgagcgtaccgacgggcggcacacctatcacgtgactggccgtcaggagctcggcgcagagagcctcgttaagagccaggaggctgggatcgaaggccacatacgcgcgctcgaacgcccccgccttccagctgctgccgggggactcttcgcacaccgcgacgctcgccaggaccccggggggcgaagttgccatggctgggcgggaggggcgcacgcgccagcgaactttacgggacacaatccccgactgcgcgctgcggtcccagaccctggagagtctagacgcgcgctacgtctcgcgagacggcgcgcatgacgcggccgtctggttcgaggatatgacccccgccgagctggaggttgtcttcccgactacggacgccaagctgaactacctgtcgcggacgcagcggctggcctccctcctgacgtacgccgggcctataaaagcgcccgacgacgccgccgccccgcagaccccggacaccgcgtgtgtgcacggcgagctgctcgcccgcaagcgggaaagattcgcggcggtcattaaccggttcctggacctgcaccagattctgcggggctgacgcgcgtgctgttgggcgggacggttcgcgaaccctttggtgggtttacgcgggcacgcacgctcccatcgcgggcgccatggcgggactgggcaagccctacaccggccacccaggtgacgccttcgagggtctcgttcagcgaattcggcttatcgtcccatctacgttgcggggcggggacggggaggcgggcccctactctccctccaacctcccctccaggtgcgcctttcagtttcatggccatgacgggtccgacgagtcgtttcccatcgagtatgtactgcggcttatgaacgactgggccgaggtcccgtgcaacccttacctgcgcatacagaacaccggcgtgtcggtgctgtttcaggggttttttcatcgcccacacaacgcccccgggggcgcgattacgccagagcggaccaatgtgatcctggggtccaccgagacgacggggttgtccctcggcgacctggacaccatcaaggggcggctcggcctggatgcccggccgatgatggccagcatgtggatcagctgctttgtgcgcatgccccgcgtgcagctcgcgtttcggttcatgggccccgaagatgccggacggacgagacggatcctgtgccgcgccgccgagcaggctattacccgtcgccgccgaacccggcggtcccgggaggcgtacggggccgaggccgggctgggggtggccggaacgggtttccgggccaggggggacggttttggcccgctccccttgttaacccaagggccctcccgcccgtggcaccaggccctgcggggtcttaagcacctacggattggcccccccgcgctcgttttggcggcgggactcgtcctgggggccgctatttggtgggtggttggtgctggcgcgcgcctataaaaaaggacgcaccgccgccctaatcgccagtgcgttccggacgccttcgccccacacagccctcccgaccgacacccccatatcgcttcccgacctccggtcccgatggccgtcccgcaatttcaccgccccagcaccgttaccaccgatagcgtccgggcgcttggcatgcgcgggctcgtcttggccaccaataactctcagtttatcatggataacaaccacccacacccccagggcacccaaggggccgtgcgggagtttctccgcggtcaggcggcggcactgacggaccttggtctggcccacgcaaacaacacgtttaccccgcagcctatgttcgcgggcgacgcaccggccgcctggttgcggcccgcgtttggcctgcggcgcacctattcaccttttgtcgttcgagaaccttcgacgcccgggaccccgtgaggcccagggagttccttctggggtgttttaatcaataaaagaccacaccaacgcacgagccttgcgtttaatgtcgtgtttattcaagggagtgggatagggttcgacggttcgaaacttaacacaccaaataatcgagcgcgtctagcccagtaacatgcgcacgtgatgtaggctggtcagcacggcgtcgctgtgatgaagcagcgcccggcgggtccgctgtaactgctgttgtaggcggtaacaggcgcggatcagcaccgccagggcgctacgaccggtgcgttgcacgtagcgtcgcgacagaactgcgtttgccgatacgggcggggggccgaattgtaagcgcgtcacctcttgggagtcatcggcggataacgcactgaatggttcgttggttatgggggagtgtggttccccagggagtgggtcgagcgcctcggcctcggaatccgagaggaacaacgaggtggcgtcggagtcttcgtcgtcagagacatacagggtctgaagcagcgacacgggcgggggggtagcgtcgatgtgtagcgcgagggaggatgcccacgaagacaccccagacaaggagctgcccgtgcgtggatttgtggaagacgcggaagccgggacggatgggcggttttgcggtgcccggaaccgaaccgccggatactccccgggtgctacatgcccgttttggggctggggttggggctggggttggggctggggttggggctggggttggggctggggttggggctggggttggggttggggttggggctggggttggggttggggctggggctggggctggggctggggctggggctggggctggggctggggctggggctggggctggggctggggctggggctggggctggggctggggttggggcgcggacaggcggctgacggtcaaatgcccccgggggcgcgcagatgtggtgggcgtggccaccggctgccgtgtagtggggcggcgggaaaccgggcctccgggcgtaacaccgccctccagcgtcaagtatgtggggggcgggcctgacgtcgggggcggggtgacgggttggaccgcgggaggcgggggagagggacctgcgggagaggatgaggtcggctcggccgggttgcggcctaaaacaggggccgtggggtcggcggggtcccagggtgaagggagggattcccgcgattcggacagcgacgcgacagcggggcgcgtaaggcgccgctgcggcccgcctacgggaaccctggggggggttggcgcgggacccgaggttagcggggggcggcggttttcgcccccgggcaaaaccgtgccggttgcgaccgggggcggaacgggatcgatagggagagcgggagaagcctggccggcggactggggaccgagcgggaggggcacaccagacaccaaagcgtggggcgctggctctgggggtttgggaggggccggggggcgcgcgaaatcggtaaccggggcgaccgtgtcggggagggcaggcggccgccaaccctgggtggtcgcggaagcctgggtggcgcgcgccagggagcgtgcccggcggtgtcggcgcgcgcgcgacccggacgaagaagcggtagaagcgcgggaggaggcgggggggcggggggcggtggcatcggggggcgccggggaactttggggggacggcaagcgccggaagtcgtcgcgggggcccacgggcgccggccgcgtgctttcggccgggacgcccggtcgtgcttcgcgagccgtgactgccggcccagggggccgcggtgcacactgggacgtggggacggactgatcggcggtgggcgaaagggggtccggggcaaggaggggcgcggggccgccggagtcgtcagacgcgagctcctccaggccgtgaatccatgcccacatgcgaggggggacgggctcgccgggggtggcgtcggtgaatagcgtgggggccaggcttccgggccccaacgagccctccgccccaacaaggtccgccgggccgggggtcgggttcgggaccgaggggctctggtcgtcgggggcgcgctggtacaccggatgccccgggaatagctcccccgacaggagggaggcgtcgaacggccgcccgaggatagctcgcgcgaggaaggggtcctcgtcggtggcgctcgcggcgaggacgtcctcgccgcccgccacaaacgggagctcctcggtggcctcgctgccaacaaaccgcatgtcgggggggccgggggggtccgggttttcccacaacaccgcgaccggggtcatggagatgtccacgagcaccaggcacggcgggccccgggcgaggggccgctcggcgatgagcgcggacaggcgcgggagctgtgccgccagacacgcgttttcgatcgggttaaggtcggcgtgcaggaggcggacggcccacgtctcgatgtcggacgacacggcatcgcgcaaggcggcgtccggcccgcgagcgcgtgagtcaaacagcgtgaggcacagctccagttccgactcgcgggaaaaggccgtggtgttgcggagcgccacgacgacgggcgcgcccaggagcactgccgccagcaccaggtccatggccgtaacgcgcgccgcgggggtgcggtgggtggcggcggccggcacggcgacgtgctggcccgtgggccggtagagggcgttggggggagcggggggtgacgcctcgcgcccccccgaggggctcagcgtctgcccagattccagacgcgcggtcagaagggcgtcgaaactgtcatactctgtgtagtcgtccggaaacatgcaggtccaaagagcggccagcgcggtgcttgggagacacatgcgcccgaggacgctcaccgccgccagcgcctgggcgggactcagctttcccagcgcggcgccgcgctcggttcccagctcggggaccgagcgccagggcgccagggggtcggtttcggacaacttgccgcggcgccagtctgccagccgcgtgccgaacatgaggccccgggtcggagggcctccggccgaaaacgctggcagcacgcggatgcgggcgtctggatgcggggtcaggcgctgcacgaatagcatggaatctgctgcgttctgaaacgcacgggggagggtgagatgcatgtactcgtgttggcggaccagatccaggcgccaaaaggtgtaaatgtgttccggggagctggccaccagcgccaccagcacgtcgttctcgttaaaggaaacgcggtgcctagtggagctctggggtccgagcggcggccccggggccgccgcgtcacccccccattccagctgggcccagcgacacccaaactcgcgcgtgagagtggtcgcgacgagggcgacgtagagctcggccgccgcatccatcgaggccccccatctcgcctggcggtggcgcacaaagcgtccgaagagctgaaagttggcggcctgggcgtcgctgagggccagctgaagccggttgatgacggtgaggacgtacatggccgtgacggtcgaggccgactccagggtgtccgtcggaagcggggggcgaatgcatgccgcctcgggacacatcagcagcgcgccgagcttgtcggtcacggccgggaagcagagcgcgtactgcagtggcgttccatccgggaccaaaaagctgggggcgaacggcctatccagcgtactggtggcctcgcgcagcaccaggggccccgggcctccgctcactcgcaggtacgcctcgccccggcggcgcagcatctgcgggtcggcctcttggccgggtggggcggacgcccgggcgcgggcgtctagggcgcgaagatccacgagcaggggcgcgggcgcggccgccgcgcccgcgcccgtctggcctgtggccttggcgtacgcgctatataagcccatgcggcgttggatgagctcccgcgcgccccggaactcctccaccgcccatggggccaggtccccggccaccgcgtccaattccgccaacaggccccccagggtgtcaaagttcatctcccaggccacccttggcaccacctcgtcccgcagccgggcgctcaggtcggcgtgttgggccacgcgccccccgagctcctccacggccccggcccgctcggcgctcttggcgcccaggacgccctggtacttggcgggaaggcgctcgtagtcccgctgggctcgcagccccgacacagtgttggtggtgtcctgcagggcgcgaagctgctcgcatgccgcgcgaaatccctcgggcgatttccaggcccccccgcgaacgcggccgaagcgaccccatacctcgtcccactccgcctcggcctcctcgaaagacctccgcagggcctcgacgcggcgacgggtgtcgaagagcgactgcaggcgcgcgccctgtcgcgtcaggaggcccgggccgtcgccgctggccgcgcttagcgggtgcgtctcaaaggtgcgctgggcatgttccaaccaggcgaccgcctgcacgtcgagctcgcgcgccttctccgtctggtccaacagaatctcgacctgatccgcgatctcctccgccgagcgcgcctggtccagcgtcttggccacggtcgccgggacggcaaccaccttcagcagggtcttcagattggccagaccctcggcctcgagctgggcccggcgctcgcgcgcggccagcacctcccgcaaccccgccgtgacccgctcggtggcttcggcgcgctgctgtttggcgcgcaccacggcgtccttggtatcggccaggtcctgtcgggtcacgaatgcgacgtagtcggcgtacgccgtgtccttcacggggctctggtccacgcgctccagcgccgccacacacgccaccagcgcgtcctcgctcgggcagggcagggtgacccctgcccggacaagctcggcggccgccgccgggtcgttgcgcaccgcggatatctcctccgcggcggcggccaggtccagcgccacgcttccgatcgcgcgccgcgcgtcggcccggagggcgtccaggcgatcgcggatatccacgtactcggcgtagcccttttgaaaaaacggcacgtactggcgcagggccggcacgccccccaagtcttccgacaggtgtaggacggcctcgtggtagtcgataaacccgtcgttcgcctgggcccgctccagcagcccccccgcgagccgcagaagccgcgccaggggctcggtgtccacccgaaacatgtcggcgtacgtgtcggccgcggccccgaaggccgcgctccagtcgatgcggtgaatggctgcgagcggggggagcatggggtggcgctggttctcgggggtgtatgggttaaacgcaagggccgtctccagggcaagggtcaccgccttggcgttggttcccagcgcctgctcggcccgctttcggaagtcccgggggttgtagccgtgcgtgcccgccagcgcctgcaggcgacggagctcgaccacgtcaaactcggcaccgctttccacgcggtccagcacggcctccacgtcggcggcccagcgctcgtggctactgcgggcgcgctgggccgccatcttctctctgaggtcggcggtggcggcctcaagttcgtcggcgcggcgtcgcgtggcgccgatgacctttcccagctcctgcagggcgcgcccgctgggggagtggtccccggccgtcccttcggcgtgcaacaggcccccgaacctgccctcgtggcccgcgaggctttcccgcgcgccggtggtcgcgcgcgtcgcggcctggatcagggaggcatgctctccctccggttggttggcggcccggcgcacctggacgacaaggtcggcggcagccgaccctaaggtcgtgagctgggcgatggccccccgcgcgtccagggccaaccgagtcgccttgacgtatcccgcggcgctgtcggccatggccgctaggaaggccaggggggaggccgggtcgctggcggccgcgcccagggccgtcactgcgtcgaccaggacgcggtgcgcccgcacggccgcatccaccgtcgacgcggggtctgccgtcgcgacggcggcgctgccggcgttgatggcgttcgagacggcgtgggctatgatcggggcgtgatcggcgaagaactgcaagagaaacggagtctcgggggcgttggcgaacaggttcttcagcaccaccacgaagctgggatgcaagccggacagagccgtcgccgtgtccggagtcgggtgctccagggcatctcggtactgccccagcagcccccacatgtccgcccgcagcgccgccgtaacctccgggggcgccccccgaacggcctcggggaggtccgaccagcccgccggcagggaggcccgcagggtcgtcaggacggccggacaggcctttagccccacaaagtcagggaggggccgcaggaccccctggagtttgtgcaagaacttctcccgggcgtcgcgggccaccttcgcccgctcccgcgctccctcgagcattgcctccagggagcgcgcgcgctcccgcaaacgggcacgcgcatcgggggcgagctctgccgtcagcttggcggcatccatggcccgcgcctgccgcagcgcttcctcggccatgcgcgtggcctctggcgacagcccgccgtcgtcggggtagggcgacgcgccgggcgcaggaacaaaggccgcgtcgctgtccagctgctggcccagggccgcatctagggcgtcgaagcgccgcagctcggccagacccgagctgcggcgcgcctgctggtcgttaatgtcgcggatgctgcgcgccagctcgtccagcggcttgcgttctatcagcccttggttggcggcgtccgtcaggacggagagccaggccgccaggtcctcgggggcgtccagcgtctggccccgctgtatcagatcccgcaacaggatggccgtggggctggtcgcgatcgggggcggggcgggaatggcggcgctctgcgcgatgtcccgcgtgtgctggtcgaagacaggcagggactctagcagctggaccacgggcacgacggcggccgaagccacgtgaaaccggcggtcgttgttgtcgctggcctgcagagccttggcgctgtatacggccccccggtaaaagtactccttaaccgcgccctcgatcgcccgacgggcctgggtccgcacctcctccagccgaacctgaacggcctcggggcccagggggggtgggcgcggagccccctgcggggccgccccggccggggcgggcattacgccgaggggcccggcgtgctgtgagaccgcgtcgaccccgcgagcgagggcgtcgagggcctcgcgcatctggcgatcctccgcctccaccctaatctcttcgccacgggcaaatttggccagagcctggactctatacagaagcggttctgggtgcgtcggggtggcgggggcaaaaagggtgtccgggtgggcctgcgagcgctccagaagccactcgccgaggcgtgtatacagattggccggcggggccgcgcgaagctgcagctccaggtccgcgagttccccgtaaaaggcgtccgtctcccgaatgacatccctagccacaaggatcagcttcgccagcgccaggcgaccgatcagagagttttcgtccagcacgtgctggacgaggggcagatgggcggccacgtcggccaggctcaggcgcgtggaggccagaaagtcccccacggccgttttccggggcagcatgctcagggtaaactccagcagggcggcggccgggccggccaccccggcctgggtgtgcgtccgggccccgttctcgatgagaaaggcgaggacgcgttcaaagaaaaaaataacacagagctccagcagccccggagaagccggatacggcgaccgtaaggcgctgatggtgagccgcgaacacgcggcgacctcgcgggccagggcggcggagcacgcggtgaacttaaccgccgtggcggccacgtttgggtgggcctcgaacagctgggcaaggtctgcgcccgggggctcgggtgagcggcgagtcttcagcgcctcgagggcctgcgaggacgccggaaccgtgggcccgtcgtcctcgcccgcctcggcgaccggcggcccggccgggtcggggggtgccgaggcgaggacaggctccggaacggaggcggggaccgcggccccgacgggggttttgcctttgggggtggatttcttcttggttttggcagggggggccgagcgtttcgttttctcccccgaagtcaggtcttcgacgctggaaggcggagtccaggtgggtcggcggcgcttgggaaggccggccgagtagcgtgcccggtgccgaccaaccgggacgacgcccatctccaggacccgcatgtcgtcgtcatcttcttcggccgcctctgcggcggggggcttgggggcggagggaggcggtggtgggatcgcggagggtgggtcggcggaggggggatccgtgggtggggtacccttcagggccaccgcccatacatcgtcgggcgcccgattcgggcgcttggcctctggttttgccgacggaccggccgtcccccgggatgtctcggaggccctgtcgtcgcgacgggcccgggtcggtggcggcgactgggcggctgtgggcgggtggggccccgtgccccctaccccctcccgggggcccacgccgacgcagggctcccccaggcccgcgatctcgccccgcagggggtgcgtgatggccacgcgccgttcgctgaacgcttcgtcctgcaggtaagtctcgctggccccgtaaagatgcagagccgcggccgtcaagtccgcaggagccgcgggttccgggcccgacggcacgaaaaacaccatggctcccgcccaccgtacgtccgggcgatcgcgggtgtaatacgtcaggtatggatacatgtcccccgcccgcactttggcgatgaacgcgggggtgccctccggaaggccgtgcgggtcaaaaaggtatgcggtgtcgccgtccctgaacagccccatccctagggggccaatggttaggagcgtgtacgacagggggcgcagggcccacgggccggcgaagaacgtgtgtgcggggcattgtgtctccagcaggcccgccgcgggctccccgaagaagcccacctcgccgtatacgcgcgagaagacacagcgcagtccgccgcgcgcccctgggtactcgaggaagttggggagctcgacgatcgaacacatgcgcggcggcccagggcccgcggtcgcgcgcgtccactcgcccccctcgaccaaacaaccctcgatggcctccgcggacagaacgtcgcgagggcccacatcaaatatgaggctgagaaaggacagcgacgagcgcatgcacgataccgacccccccggctccaggtcgggcgcgaactggttccgagcaccggtgaccacgatgtcgcgatcccccccgcgttccatcgtggagtgcggtggggtgcccgcgatcatatgtgccctactggccagagacccggcctgtttatggaccggacccccggggttagtgttgtttccgccacccatgcccccgtaccatggccccggttcccctgattaggctacgagtcgcggtgatcgcttcccaaaaaccgagctgcgtttgtctgtcttgatctttcccccccccgcccgcccgcccgcccgcacaccataacaccgagaacaacacacgggggtgggcgtaacataataaagctttattggtaactagttaacggcaagtccgtgggtggcgcgacggtgtcctccgggctcatctcgtcgtcctcgacgggggtgttggaatgaggcgccccctcgcggtccgcctggcgtgggccgtgcccataggcctccggcttctgtgcgtccatgggcataggcgcggggagactgtttccggcgtcgcggacctccaggtccctgggagactccggtccggctaacggacgaaacgcggaagcgcgaaacacgccgtcggtgacccgcaggagctcgttcatcagtaaccaatccatactcagcgtaacggccagcccctggcgagacagatccacggagtccggaaccgcggtcgtctggcccagggggccgaggctgtagtccccccaggcccctaggtcgcgacggctcgtaagcacgacgcggtcggccgcggggctttgcgggggggcgtcctcgggcgcatgcgccattacctctcggatggccgcggcgcgctggtcggccgagctgaccaagggcgccacgaccacggcgcgctccgtctgcaggcccttccacgtgtcgtggagttcctggacaaactcggccacgggctcgggtcccgcggccgcgcgcgcggcttgatagcaggccgagagacgccgccagcgcgctagaaactgacccatgaagcaaaacccggggacctggtctcccgacagcagcttcgacgcccgggcgtgaatgccggacacgacggacagaaacccgtgaatttcgcgccggaccacggccagcacgttgtcctcgtgcgacacctgggccgccagctcgtcacacacccccaggtgcgccgtggtttcggtgatgacggaacgcaggctcgcgagggacgcgaccagcgcgcgcttggcgtcgtgatacatgctgcagtactgactcaccgcgtcccccatggcctcggggggccagggccccaggcggtcgggcgtgtccccgaccaccgcatacaggcggcgcccgtcgctctcgaaccgacactcgaaaaaggcggagagcgtgcgcatgtgcagccgcagcagcacgatggcgtcctccagttggcgaatcagggggtctgcgcgctcggcgaggtcctgcagcaccccccgggcggccagggcgtacatgctaatcaacaggaggctggtgcccacctcggggggcggggggggctgcagctggaccaggggccgcagctgctcgacggcacccctggagatcacgtacagctcccggagcagctgctctatgttgtcggccatctgcatagtggggccgaggccgccccgggcggccggttcgaggagggtaatcagcgcgcccagtttggtgcgatggccctcgaccgtggggagatagcccagcccaaaatcccgggcccaggccaacacacgcagggcgaactcgaccgggcgtggaaggtaggccgcgctacacgtggccctcaacgcgtccccgaccaccagggccagaacgtaggggacgaagcccgggtcggcgaggacgttggggtgaatgccctcgagggcggggaagcggatctgggtcgccgcggccaggtggacagagggggcgtggctgggctgcccgacggggagaagcgcggacagcggcgtggccggggtggtgggggtgatgtcccagtgggtctgaccatacacgtcgatccagatgagcgccgtctcgcggagaaggctgggttgaccggaactaaagcggcgctcggccgtctcaaactcccccacgagcgcccgccgcaggctcgccagatgttccgtcggcacggccggacccatgatacgcgccagcgtctggctcagaacgccccccgacaggccgaccgcctcgcagagccgcccgtgcgtgtgctcgctggcgccctggacccgcctgaaagtttttacgtagttggcatagtacccgtattcccgcgccagaccaaacacgttcgaccccgcgagggcaatgcacccaaagagctgctggacttcgccgagtccgtggccggcgggcgtccgcgcggggacgcccgccgccagaaacccctccagggccgaaaggtagtgcgtgcagtgcgagggcgtgaacccagcgtcgatcagggtgttgatcaccacggagggcgaattggtattctggatcaacgtccacgtctgctgcaacagagccaacagccgctgctgggcgccggcggagggctgctccccgagctgcagcaggctggagacggcaggctggaagactgccagtgccgacgaactcaggaacggcacgtcgggatcaaacacggccacgtccgtccgcacgcgcgccattagcgtccccgggggcgcacaggccgagcgcgggctgacgcggctgagggccgtcgacacgcgcacctcctcgcggctgcgaaccatcttgttggcctccagtggcggaatcattatggccgggtcgatctcccgcacggtgtgctgaaactgcgccaacaggggcggcgggaccacagccccccgctcgggggtcgtcaggtactcgtccaccagggccaacgtaaagagggcccgtgtgaggggagtgagggtcgcgtcgtctatgcgctggaggtgcgccgagaacagcgtcacccgattactcaccagggccaagaaccggaggccctcttgcacgaacggggcggggaagagcaggctgtacgccggggtggtaaggttcgcgctgggctgccccaacgggaccggcgccatcttgagcgacgtctccccaagggcctcgatggaggtccgcgggctcatggccaagcagctcttggtgacggtttgccagcggtctatccactccacggcgcactggcggacgcggaccggccccagggccgccgcggtgcgcaggccggcggaatccagcgcatgggacgtgtcggagccggtgaccgcgaggatggtgtccttgatgacctccatctcccggaaggcctggtcgggggcctcggggagagccaccaccaagcggtgtacgagcaacccggggaggttctcggccaagagcgccgtctccggaagcccgtgggcccggtggagcgcgcacaggtgttccagcagcggccgccagcatgcccgcgcgtctgccggggcgatggccgttcccgacaacagaaacgccgccatggcggcgcgcagcttggccgtggccagaaacgccgggtcgtccgccccgtttgccgtctcggccgtgggggttggcggttggcgaaggccggctaggctcgccaataggcgctgcataggtccgtccgagggcggaccggcgggtgaggtcgtgacgacgggggcctcggacgggagaccgcggtctgccatgacgcccggctcgcgtgggtgggggacagcgtagaccaacgacgagaccgggcgggaatgactgtcgtgcgctgtagggagcggcgaattatcgatcccctgcggccctccaggaaccccgcaggcgttgcgagtaccccgcgtcttcgcggggtgttatacggccacttaagtcccggcatcccgttcgcggacccaggcccgggggattgtccggatgtgcgggcagcccggacggcgtgggttgcggactttctgcggggcggcccaaatggccctttaaacgtgtgtatacggacgcgccgggccagtcggccaacacaacccaccggaggcggtagccgcgtttggctgtggggtgggtggttccgccttgcgtgagtgtcctttcgacccccccctcccccgggtcttgctaggtcgcgatctgtggtcgcaatgaagaccaatccgctacccgcaaccccttccgtgtggggcgggagtaccgtggaactcccccccaccacacgcgataccgcggggcagggcctgcttcggcgcgtcctgcgccccccgatctctcgccgcgacggcccagtgctccccagggggtcgggaccccggagggcggccagcacgctgtggttgcttggcctggacggcacagacgcgccccctggggcgctgacccccaacgacgataccgaacaggccctggacaagatcctgcggggcaccatgcgcgggggggcggccctgatcggctccccgcgccatcatctaacccgccaagtgatcctgacggatctgtgccaacccaacgcggatcgtgccgggacgctgcttctggcgctgcggcaccccgccgacctgcctcacctggcccaccagcgcgccccgccaggccggcagaccgagcggctgggcgaggcctggggccagctgatggaggcgaccgccctggggtcggggcgagccgagagcgggtgcacgcgcgcgggcctcgtgtcgtttaacttcctggtggcggcgtgtgccgcctcgtacgacgcgcgcgacgccgccgatgcggtacgggcccacgtcacggccaactaccgcgggacgcgggtgggggcgcgcctggatcgtttttccgagtgtctgcgcgccatggttcacacgcacgtcttcccccacgaggtcatgcggtttttcggggggctggtgtcgtgggtcacccaggacgagctagcgagcgtcaccgccgtgtgcgccgggccccaggaggcggcgcacaccggccacccgggccggccccgctcggccgtgatcctcccggcgtgtgcgttcgtggacctggacgccgagctggggctggggggcccgggcgcggcgtttctgtacctggtattcacttaccgccagcgccgggaccaggagctgtgttgtgtgtacgtgatcaagagccagctccccccgcgcgggttggagccggccctggagcggctgtttgggcgcctccggatcaccaacacgattcacggcaccgaggacatgacgcccccggccccaaaccgaaaccccgacttccccctcgcgggcctggccgccaatccccaaaccccgcgttgctcggctggccaggtcacgaacccccagttcgccgacaggctgtaccgctggcagccggaccttcgggggcgccccaccgcacgcacctgtacgtacgccgcctttgcagagctcggcatgatgcccgaggatagtccccgctgcctgcaccgcaccgagcgctttggggcggtcagcgtccccgttgttattctggaaggcgtggtgtggcgccccggcgagtggcgggcatgcgcgtgagcgtagcaaacgccccgcccacacaacgctccgcccccaaccccttccccgctgtcactcgtggttcgttgacccggacgtccgccaaataaagccactgaaacccgaaacgcgagtgttgtaacgtcctttgggcgggaggaagccacaaaatgcaaatgggatacatggaaggaacacacccccgtgactcaggacatcggcgtgtccttttgggtttcactgaaactggcccgcgccccacccctgcgcgatgtggataaaaagccagcgcgggtggtttagggtaccacaggtgggtgctttggaaacttgtcggtcgccgtgctcctgtgagcttgcgtccctccccggtttcctttgcgctcccgccttccggacctgctctcgcctatcttctttggctgtcggtgcgattcgtcaggcagcggccttgtcgaatctcgaccccaccactcgccggacccgccgacgtcccctctggagcccgccgaaacccgccgcgtctgttgaaatggccagccgcccagccgcatcctctcccgtcgaagcgcgggccccggttgggggacaggaggccggcggccccagcgcagccacccagggggaggccgccggggcccctctcgcccacggccaccacgtgtactgccagcgagtcaatggcgtgatggtgctttccgacaagacgcccgggtccgcgtcctaccgcatcagcgatagcaactttgtccaatgtggttccaactgcaccatgattatcgacggagacgtggtgcgcgggcgcccccaggacccgggggccgcggcatcccccgctcccttcgttgcggtgacaaacatcggagccggcagcgacggcgggaccgccgtcgttgcattcgggggaaccccacgtcgctcggcggggacgtctaccggtacccagacggccgacgtcccagccgaggcccttgggggcccccctcctcctccccgcttcaccctgggtggcggctgttgctcctgtcgcgacacacggcgccgctctgcggtattcgggggggagggggatcccgtcggccccgcggagttcgtctcggacgaccggtcgtccgattccgactcggatgactcggaggacaccgactcggagacgctgtcacacgcctcctcggacgtgtccggcggggccacgtacgacgacgcccttgactccgattcgtcatcggatgactccctgcagatagatggccccgtgtgtcgcccgtggagcaatgacaccgcgcccctggatgtttgccccgggacccccggcccgggcgccgacgccggtggtccctcagcggtagacccacacgcgccgacgacaggggccggcgctggtcttgcggccgatcccgccgtggcccgggacgacgcggaggggctttcggacccccggccacgtctgggaacgggcacggcctaccccgtccccctggaactcacgcccgagaacgcggaggccgtggcgcgctttctgggagatgccgtgaaccgcgaacccgcgctcatgctggagtacttttgccggtgcgcccgcgaggaaaccaagcgtgtcccccccaggacattctgcagcccccctcgcctcacggaggacgactttgggcttctcaactacgcgctcgtggagatgcagcgcctgtgtctggacgttcctccggtcccgccgaacgcatacatgccctattatctcagggagtatgtgacgcggctggtcaacgggttcaagccgctggtgagccggtccgctcgcctttaccgcatcctgggggttctggtgcacctgcggatccggacccgggaggcctcctttgaggagtggctgcgatccaaggaagtggccctggactttggcctgacggaaaggcttcgcgagcacgaagcccagctggtgatcctggcccaggttctggaccattacgactgtctgatccacagcacaccgcacacgctggtcgagcgggggctgcaatcggccctgaagtatgaggagttttacctaaagcgctttggcgggcactacatggagtccgtcttccagatgtacacccgcatcgccggctttttggcctgccgggccacgcgcggcatgcgccacatcgccctggggcgagaggggtcgtggtgggaaatgttcaagttctttttccaccgcctctacgaccaccagatcgtaccgtcgacccccgccatgctgaacctggggacccgcaactactacacctccagctgctacctggtaaacccccaggccaccacaaacaaggcgaccctgcgggccatcaccagcaacgtcagtgccatcctcgcccgcaacgggggcatcgggctatgcgtgcaggcgtttaacgactccggccccgggaccgccagcgtcatgcccgccctcaaggtcctcgactcgctggtggcggcgcacaacaaagagagcgcgcgtccgaccggcgcgtgcgtgtacctggagccgtggcacaccgacgtgcgggccgtgctccggatgaagggggtcctcgccggcgaagaggcccagcgctgcgacaatatcttcagcgccctctggatgccagacctgtttttcaagcgcctgattcgccacctggacggcgagaagaacgtcacatggaccctgttcgaccgggacaccagcatgtcgctcgccgactttcacggggaggagttcgagaagctctaccagcacctcgaggtcatggggttcggcgagcagatacccatccaggagctggcctatggcattgtgcgcagtgcggccacgaccgggagccccttcgtcatgttcaaagacgcggtgaaccgccactacatctacgacacccagggggcggccatcgccggctccaacctctgcaccgagatcgtccatccggcctccaagcgatccagtggggtctgtaatctgggaagcgtgaatctggcccgatgcgtctccaggcagacgtttgactttgggcggctccgcgacgccgtgcaggcgtgcgtgctgatggtgaacatcatgatcgacagcacgctacaacccacgccccagtgcacccgcggcaacgacaacctgcggtccatgggaatcggcatgcagggcctgcacacggcctgcctgaagctggggctggatctggagtctgccgaatttcaggacctgaacaaacacatcgccgaggtgatgctgctgtcggcgatgaagaccagcaacgcgctgtgcgttcgcggggcccgtcccttcaaccactttaagcgcagcatgtatcgcgccggccgctttcactgggagcgctttccggacgcccggccgcggtacgagggcgagtgggagatgctacgccagagcatgatgaaacacggcctgcgcaacagccagtttgtcgcgctgatgcccaccgccgcctcggcgcagatctcggacgtcagcgagggctttgcccccctgttcaccaacctgtttagcaaggtgacccgggacggcgagacgctgcgccccaacacgctcctgctaaaggaactggaacgcacgtttagcgggaagcgcctcctggaggtgatggacagtctcgacgccaagcagtggtccgtggcgcaggcgctcccgtgcctggagcccacccaccccctccggcgattcaagaccgcgtttgactacgaccagaagttgctgatcgacctgtgtgcggaccgcgccccctacgtcgaccatagccaatccatgaccctgtatgtcacggagaaggcggacgggaccctcccagcctccaccctggtccgccttctggtccacgcatataagcgcggactaaaaacagggatgtactactgcaaggttcgcaaggcgaccaacagcggggtctttggcggcgacgacaacattgtctgcacgagctgcgcgctgtgaccgacaaaccccctccgcgccaggcccgccgccactgtcgtcgccgtcccacgcgctcccccgctgccatggattccgcggccccagccctctcccccgctctgacggcccatacgggccagagcgcgccggcggacctggcgatccagattccaaagtgccccgaccccgagaggtacttctacacctcccagtgtcccgacattaaccacctgcgctccctcagcatccttaaccgctggctggaaaccgagcttgttttcgtgggggacgaggaggacgtctccaagctttccgagggcgagctcagcttttaccgcttcctcttcgctttcctgtcggccgccgacgacctggttacggaaaacctgggcggcctctccggcctgtttgagcagaaggacattctccactactacgtggagcaggaatgcatcgaagtcgtacactcgcgcgtgtacaacatcatccagctggtgctttttcacaacaacgaccaggcgcgccgcgagtacgtggccggcaccatcaaccacccggccatccgcgccaaggtggactggttggaagcgcgggtgcgggaatgcgcctccgttccggaaaagttcattctcatgatcctcatcgagggcatcttttttgccgcctcgtttgccgccatcgcctaccttcgcaccaacaaccttctgcgggtcacctgccagtcaaacgacctcatcagccgggacgaggccgtgcacacgacggcctcgtgttacatctacaacaactacctcggcgggcacgccaagcccccgcccgaccgcgtgtacgggctgttccgccaggcggtcgagatcgagatcggatttatccgatcccaggcgccgacggacagccatatcctgagcccggcggcgctggcggccatcgaaaactacgtgcgattcagcgcggatcgcctgttgggccttatccacatgaagccactgttttccgccccaccccccgacgccagctttccgctgagcctcatgtccaccgacaaacacaccaattttttcgagtgtcgcagcacctcctacgccggggcggtcgtcaacgatctgtgagggtcgcggcgcgcttctacccgtgtttgcccataataaacctctgaaccaaactttgggtctcattgtgattcttgtcagggacgcgggggtgggagaggataaaaggcggcgcaaaaagcagtaaccaggtccggccagattctgagggcataggataccataattttattggtgggtcgtttgttcggggacaagcgcgctcgtctgacgtttgggctactcgtcccagaatttggccaggacgtccttgtagaacgcgggtgggggggcctgggtccgcagctgctccagaaacctgtcggcgatatcaggggccgtgatatgccgggtcacgatagatcgcgccaggttttcgtcgcggatgtcctggtagataggcaggcgtttcagaagagtccacggcccccgctccttggggccgataagcgatatgacgtacttaatgtagcggtgttccaccagctcggtgatggtcatgggatcggggagccagtccagggactctggggcgtcgtggatgacgtggcgtcgccggctggccacataactgcggtgctcttccagcagctgcgcgttcgggacctggacgagctcgggcggggtgagtatctccgaggaggacgacctggggccggggtggcccccggtaacgtcccggggatccagggggaggtcctcgtcgtcttcgtatccgccggcgatctgttgggttagaatttcggtccacgagacgcgcgtctcggtgccgccggtggccggcggcagagggggcctggtttccgtggagcgcgagctggtgtgttcccggcggatggcccgccgggtctgagagcgactcgggggggtccagtgacattcgcgcagcacatcctccacggaggcgtaggtgttattgggatggaggtcggtgtggcagcggacaaagagggccaggaactgggggtagctcatcttaaagtacttcagtatatcgcgacagttgatcgtgggaatgtagcaggcgctaatatccaacacaatatcgcagcccatcaacaggaggtcagtgtccgtggtgtacacgtacgcgaccgtgttggtgtgatagaggttggcgcaggcatcgtccgcctccagctgacccgagttaatgtaggcgtaccccagggcccggagaacgcgaatacagaacagatgcgccagacgcagggccggcttcgagggcgcggcggacggcagcgcggctccggacccggccgtcccccgggtccccgaggccagagaggtgccgcgtcggcgcatgttggaaaaggcagagctgggtctggagtcggtgatgggggaaggcggtggagaggcgtccacgtcactggcctcctcgtccgtccggcactgggccgtcgtgcgggccaggatggccttggctccaaacacaaccggctccatacaattgaccccgcgatcggtaacgaagatggggaaaagggacttttgggtaaacacctttaataagcgacagaggcagtgtagcgtaatggcctcgcggtcgtaactggggtatcggcgctgatatttgaccaccaacgtgtacatgacgttccacaggtccacggcaatgggggtgaagtacccggccggggccccaaggccccggcgcttgaccagatggtgtgtgtgggcaaacttcatcatcccgaacaaacccatgtcaggtcgattgtaactgcggatcggcctaactaaggcgtggttggtgcgacggtccgggacacccgagcctgtctctctgtgtatggtgacccagacaacaacaccgacacaagaggacaataatccgttaggggacgctctttataatttcgatggcccaactccacgcggattggtgcagcaccctgcatgcgccggtgcgggccaaccttccccccgctcattgcctcttccaaaagggtgtggcctaacgagctgggggcgtatttaatcaggctagcgcggcgggcctgccgtagtttctggctcggtgagcgacggtccggttgcttgggtcccctggctgccatcaaaaccccaccctcgcagcggcatacgccccctccgcgtcccgcacccgagaccccggcccggctgccctcaccaccgaagcccacctcgtcactgtggggtgttcccagcccgcgttgggatgacggattcccctggcggtgtggcccccgcctcccacgtggaggacgcgtcggacgcgtccctcgggcagccggaggagggggcgccctgccaggtggtcctgcagggcgccgagcttaatggaatcctacaggcgtttgccccgctgcgcacgagccttctggactcgcttctggttatgggagaccggggcatccttatccataacacgatctttggggagcaggtgttcctgcccctggaacactcgcaattcagtcggtatcgctggcgcggacccacggcggcgttcctgtctctcgtggaccagaagcgctccctcctgagcgtgtttcgcgccaaccagtacccggacctacgtcgggtggagttggcgatcacgggccaggccccgtttcgcacgctggttcagcgcatatggacgacgacgtccgacggcgaggccgttgagctagccagcgagacgctgatgaagcgcgaactgacgagctttgtggtgctggttccccagggaacccccgacgttcagttgcgcctgacgaggccgcagctcaccaaggtccttaacgcgaccggggccgatagtgccacgcccaccacgttcgagctcggggttaacggcaaattttccgtgttcaccacgagtacctgcgtcacatttgctgcccgcgaggagggcgtgtcgtccagcaccagcacccaggtccagatcctgtccaacgcgctcaccaaggcgggccaggcggccgccaacgccaagacggtgtacggggaaaatacccatcgtaccttctctgtggtcgtcgacgattgcagcatgcgggcggtgctccggcgactgcaggtcgccgggggcaccctcaagttcttcctcacgacccccgtccccagtctgtgcgtcaccgccaccggtcccaacgcggtatcggcggtatttctcctgaaaccccagaagatttgcctggactggctgggtcatagccaggggtctccttccgccgggagctcggcctcccgggcctctgggagcgagccaacagacagccaggactccgcgtcggacgcggtcagccacggcgatccggaagacctcgatggcgctgcccgggcgggagaggcgggggcctcgtacgcctgtccgatgccgtcgtcgaccacgcgggtcactcccacgaccaagcgggggcgctcggggggcgaggatgcgcacgcggacacggccctaaagaaacctaagacggggtcgcccaccgcacccccgcccgcagatccagtccccctggacacggaggacgactccgatgcggcggacgggacggcggcccgtcccgccgctccagacgcccgaagcggaagccgttacgcgtgttactttcgcgacctcccgaccggagaagcaagccccggcgccttctccgccttccgggggggcccccaaaccccgtctggttttggattcccctgacggggcggggccttagcggccgcccaaccctcgcaacatcccggggttaatgtaaataaacttggtattgcccaacactctcccgcgtgtcgcgtgtggttcatgtgtgtgcctggcgcccccaccctcgggttcgtgtatttcctttccctgtccttataaaagccgtatgtggggcgctgacggaaccaccccgcgtgccatcacggccaaggcgcgggatgctccgcaacgacagccaccgggccgcgtccccggaggacggccagggacgggtcgacgacggacggccacacctcgcgtgcgtgggggccctggcgcgggggttcatgcatatctggcttcaggccgccacgctgggttttgcgggatcggtcgttatgtcgcgcgggccgtacgcgaatgccgcgtctggggcgttcgccgtcgggtgcgccgtgctgggctttatgcgcgcgccccctcccctcgcgcggcccaccgcgcggatatacgcctggctcaaactggcggccggtggagcggcccttgttctgtggagtctcggggagcccggcacgcagccgggggccctggccccgggcccggccacccagtgcctggcgctgggcgccgcctatgcggcgctcctggtgctcgccgatgacgtctatccgctctttctcctcgccccggggcccctgttcgtcggcaccctggggatggtcgtcggcgggctgacgatcggaggcagcgcgcgctactggtggatcggtgggcccgccgcggccgccctggccgcggcggtgttggcgggcccgggggcgaccaccgccagggactgcttctccagggcgtgccccgaccaccgccgcgtctgcgtcatcgtcgcaggcgagtctgtttcccgccgccccccggaggacccagagcgacccggggacccagggccaccgtcccccccgacaccccaacgatcccaggggccgccggccgatgaggtcgcaccggccggggtagcgcggcccgaaaacgtctgggtgcccgtggtcacctttctgggggctggcgcgctcgccgtcaagacggtgcgagaacatgcccggggaacgccgggcccgggcctgccgctgtggccccaggtgtttctcggaggccatgtggcggtggccctgacggagctgtgtcaggcgcttgcgccctgggaccttacggacccgctgctgtttgttcacgccggactgcaggtcatcaacctcgggttggtgtttcggttttccgaggttgtcgtgtatgcggcgctagggggtgccgtgtggatttcgttggcgcaggtgctggggctccggcgtcgcctgcacaggaaggaccccggggacggggcccggttggcggcgacgcttcggggcctcttcttctccgtgtacgcgctggggtttggggtgggggcgctgctgtgccctccggggtcaacgggcgggcggtcgggcgattgatatatttttcaataaaaggcattagtcccgaagaccgccggtgtgtgatgatttcgccataacacccaaaccccggatggggcccgggtataaattccggaaggggacacgggctaccttcactaccgagggcgcttggtcgggaggccgcatcgaacgcacacccccatccggtggtccgtgtggaggtcgtttttcagtgcccggtctcgctttgccgggaacgctagccgatccctcgcgagggggaggcgtcgggcatggccccggggcgggtgggccttgccgtggtcctgtggagcctggtgtggctcggggcgggggtgtccgggggctcggaaactgcctccaccgggcccacgatcaccgcgggagcggtgacgaacgcgagcgaggcccccacatcggggtcccccgggtcagccgccagcccggaggtcacccccacatcgaccccaaaccccaacaatgtcacacaaaaccaaaccacccccaccgagccggccagccccccaacaacccccaagcccacctccacacccaaaagcccccccacgtccacccccgaccccaaacccaagaacaacaccacccccgccaagtcggaccgccccactaaaccccccgggcccgtgtggtgcgaccgccgcgatttattggcccggtacggctcgcgggtgcagatccgatgccggtttcggaattccacccgcatggagttccgcctccagatatggcgttactccatgggtccgtcccccccaatcgctccggctcccgacctagaggaggtcctgacgaacatcaccgccccacccgggggactcctggtgtacgacagcgcccccaacctaacggacccccacgtgctctgggcggagggggccggcccgggcgccgaccctccgttgtattctgtcaccgggccgctgccgacccagcggctgattatcggcgaggtgacgcccgcgacccagggaatgtattacttggcctggggccggatggacagcccgcacgagtacgggacgtgggtgcgcgtccgcatgttccgccccccgtctctgaccctccagccccacgcggtgatggagggtcagccgttcaaggcgacgtgcacggccgccgcctactacccgcgtaaccccgtggagtttgtctggttcgaggacgaccaccaggtgtttaacccgggccagatcgacacgcagacgcacgagcaccccgacgggttcaccacagtctctaccgtgacctccgaggctgtcggcggccaggtccccccgcggaccttcacctgccagatgacgtggcaccgcgactccgtgacgttctcgcgacgcaatgccaccgggctggccctggtgctgccgcggccaaccatcaccatggaatttggggtccggcatgtggtctgcacggccggctgcgtccccgagggcgtgacgtttgcctggttcctgggggacgacccctcaccggcggctaagtcggccgttacggcccaggagtcgtgcgaccgccccgggctggctacggtccggtccaccctgcccatttcgtacgactacagcgagtacatctgtcggttgaccggatatccggccgggattcccgttctagagcaccacggcagtcaccagcccccacccagggaccccaccgagcggcaggtgatcgaggcgatcgagtgggtggggattggaatcggggttctcgcggcgggggtcctggtcgtaacggcaatcgtgtacgtcgtccgcacatcacagtcgcggcagcgtcatcggcggtaacgcgagacccccccgttacctttttaatatctatatagtttggtccccctctatcccgcccaccgctgggcgctataaagccgccaccctctcttccctcaggtcatccttggtcgatcccgaacgacacacggcgtggagcaaaacgcctccccctgagccgctttcctaccagcgcaacggcatgcctctgcgggcatcggaacacgcctaccggcccctgggccccgggacaccccccatgcgggctcggctccccgccgcggcctgggttggcgtcgggaccatcatcgggggagttgtgatcattgccgcgttggtcctcgtgccctcgcgggcctcgtgggcactttccccatgcgacagcggatggcacgagttcaacctcgggtgcatatcctgggatccgacccccatggagcacgagcaggcggtcggcggctgtagcgccccggcgaccctgatcccccgcgcggctgccaaacagctggccgccgtcgcacgcgtccagtcggcaagatcctcgggctactggtgggtgagcggagacggcattcgggcctgcctgcggctcgtcgacggcgtcggcggtattgaccagttttgcgaggagcccgcccttcgcatatgctactatccccgcagtcccgggggctttgttcagtttgtaacttcgacccgcaacgcgctggggctgccgtgaggcgcgtgtactgcggtctgtctcgtctcctcttctccccttccctccccctccgcatcccaggatcacaccggccaacgagggttggggggtccggcacggacccaaaataataaacacacaatcacgtgcgataaaaagaacacgcggtcccctgtggtgtttttggttatttttattaaatctcgtcgtcaaacagggggaaaggggcgtggtctagcgacggcagcacgggtggaggcgttcaccggctccggcgtccttcgcgtttaagcttggtcaggagggcgctcagggcggcgacgttggtcgggccgtcgttggtcagggcgttggctcgatggcgggcgaggacgggcgaggggctcaacggcgggggcgggggcccggtgcggcccgggggggaaaatagggcggatcccccccagtcgtacaggggattttccgcctcaatgtacggggaggccggcgctgcattcgccgtgttcgcgcagacgttttcgtagacccgcatccatggtatttcctcgtagacacgccccccgtcctcgctcacagtctcgtatattgactcgtcgtcctcgtagggggcgtgccgttcgcgggccgaggcggcgtgggtggctttgcggcgggcgtcgtcgtcgtcgtcggccgtcagatacgtggcttccatctggtcgggttctccctccggggcgggtccccacccccgtggccgatcgaggctccccagagacgcgcgccggacgaggagggggcacgtcgccgccggcggtcgcctgtcgggtcccgcgacgttacgggccgggaggcgcgggggcacctcccccatgtgcgtgtaatacgtggccggctgtgcggccgcagcggggggctcggcgaccgggtcgtccgcatccggaagcgggggcgccgcgccgtccgcgcggcgcctccggaaccgccgggtggccgcgggggtcgagtgtaggcgaggtcgggggaggggcgggggctcgttgtcgcgccgcgcccgctgaatcttttcccgacaggtcccaccccccgcgcgatgcccccccgggccgcgggccatgtcgtccgggggaggccccgcggaccacgtcgtccggcgagacgccacgagccgcaggatggactcgtagtggagcgacggcgccccgctgcggagcagatccgcggccagggcggccccgaaccaagccttgatgctcaactccatccgggcccagctgggggcggtcatcgtggggaacaggggggcggtggtccgacagaaacgctcctggctgtccaccgcggcccgcagatactcgttgttcaggctgtcggtggcccagacgccgtacccggtgagggtcgcgttgatgatatactgggcgtggtgatggacgatcgacagaacctccaccgtggatacgacggtatccacggtcccgtacgtaccgccgctccgcttgccggtctgccacaggttggctaggcgcgtcaggtggcccaggacgtcgctgaccgccgccctgagcgccatgcactgcatggagccggtcgtgccgctgggaccccggtccagatggcgcgcgaacgtttccgcgggcgcctccgggctgccgccgagcgggaggaaccggcgattggagggactcagccggtggcatacgtgcttgtctgtcgtccacagcatccaggacgcccaccggtacagcacggagacgtaggccaggagctcgttgagccgcagtgcggtgtcggtgctggggcggcttgggtccgccgggcgcataaagaacatgtactgctgaatccgatggagggcgtcgcgcaggccggccacggtggcggcgtacttggccgccgcggccccgctcttgaacggggtgcgcgccagcagctttggcgccagggtgggccgcagcagcacgtgaaggctggggtcgcagtcgcccacggggtcctcggggacgtccaggccgctgggcaccaccgtctgcaggtacttccagtactgcgtgaggatggcgcggctcaactggccgccggtgagctccacctcgcccagcgcctgggtggcggccgaagcgtagtgccggatgtactcgtagtgcgggtcgctggcgagcccgtccacgatcaaactctcgggaaccgtgttgtgttgccgcgcggccaaccggacgctgcgatcggtgcaggtcagaaacgccggctgcgcgtcgtcggagcgctgccgcaaggcgcccacggccgcgctaaggagcccctccggggtggggagcagacacccgccgaagatgcgccgctcgggaacgcccgcgttgtcgccgcggatcaggttggcaggcgtcaggcaccgcgccagccgcagggagctcgcgccgcgcgtccggcgctgcatggtgacgcccgttcggtcgggacccgccggtcggagttatgccgcgtccagggccatcggggcgctttttatcgggaggagcttatgggcgtggcgggcctcccagcccggtcgcgcgcctccccgacacgtgcgcccgcagggcggcggccccctcgtctcccatcagcagtttcctaaactgggacatgatgtccaccacgcggacccgcgggcccaacacggacccgccgcttacgggggcgggggggaagggctccaggtccttgagaagaaaggcggggtctgccgtcccggacacgggggcccggggcgctgaggaggcggggcgcagatccacgtgctccgcggccgcgcggacgtccgcccagaacttggcgggggtggtgcgcgcgtacaggggctgggtcgctcggaggacgcacgcgtagcgcaggggggtgtacgtgcccacctcgggggccgtgaatcccccgtcaaacgcggccagtgtcacgcacgccaccacggtgtcggcaaagcccagcagccgctgcaggacgagcccggcggccagaatggcgcgcgtggccgccgcgtcgtcccggcgccggtgcgcgtccccgcacgcccgggcgtactttaaggtcacggtcgccagggccgtgtgcagcgcgtacaccgcagcgcccagcacggcgttgagcccgctgttggcgagcagccggcgcgctgcggtgtcgcccagcgcctcgtgctcggcccccacgaccgcggggcttcccaggggcagggcgcgaaacagctcctcccgcgccacgtccgcaaaggcggggtggtgcacgtgcgggtgcaggcgcgcccccacgaccaccgagagccactggaccgtctgctccgccatcaccgccagcacatccagcacgcgccccaggaaggcggcctcccgcgtcaaaacgcaccggacggcgtcgggattgaagcgggcgagcagggccccggtggccaggtacgtcatgcggccggcatagcgggcggccacgcgacagtcgcggtccagcagcgcgcgcaccccgggccagtacagcagggaccccagcgagctgcgaaacaccgcggcgtcggggccggattggggggacactaacccccccgcgctcagtaacggcacggccgcggccccgacgggacgcaacgccgtgaggctcgcgaactgccgcctcagctcggcagccctgtcgtccaggtccgacccgcgcgcctctgcgtgaaggcgcgtcccgcacacccacccgttgatggccagccgcacgacggcatccgccaaaaagctcatcgcctgggcggggctggtttttgttcgacgatccgtcaggtcaagaatcccatcgcccgtgatataccaggccaacgcctcgccctgctgcagggtttggcggaaaaacaccgcggggttgtcgggggaggcgaagtgcatgacccccacgcgcgataacccgaacgcgctatccggacacgggtaaaacccggccggatgccccagggctagggcggagcgcacggactcgtcccacacggcaacctgaggggccagtcgatccaacgggaatgccgcccggagctccgggcccggcacgcgtccctccagaacctccaccttgggcggggaacgggccccgccgccgtcctccggcccgacgtcttccgggtagtcgtcctcctcgtactgcagctcctctaggaacagcggcgacggcgccacccgcgaaccgccgacccgccccaaaatagcccgcgcgtcgacgggacccaggtatcccccctgccgggcctgcggaggaccgcggggaacctcatcatcatcgtccaggcgaccgcgcaccgactggctacgggccgcatcgggcccggggcgctgccgggacgctcggcgatgggatgtgggcggggcttccgacgcgcgccgtcgtcgggctcgcgggccttcccgtcgacggcgcacgggcggctcgtcgcccgccatctcctccagagcctctagctcgctgtcgtcatccccgcggaacaccgcacgcaggtaccccatgaaccccaccccatcgcccgctggctcgtccgccacgggcgaggcgcgggggcgggtggatgcgcgcctcctacgccccgcgggttcgcgagccgacatggtggcgatagacgcgggttatcggatgtccgctaccccccaaaaaagaaaaagaccccacagcgcggatggaggccggggtaggtgccgccggaccccctcgcgatgggaatggacgggagcgacggggccggcgcaaaaaacgcagtatctcccgcgaaggctacccgccgccccagcccccggccaaatgcggaaacggtcccgcgctctcgcctttatacgcgggccgccctgcgacacaatcacccgtccgtggtttcgaatctacacgacaggcccgcagacgcggctaacacacacgccggcaacccagaccccagtgggttggttgcgcggtcccgtctcctggctagttcttttccccaccaccaaataatcagacgacaaccgcaggtttttgtaatgtatgtgctcgtgtttattgtggatacgaaccggggacgggaggggaaaacccagacgggggatgcgggtccggtcgcgccccctacccaccgtactcgtcaattccaagggcatcggtaaacatctgctcaaactcgaagtcggccatatccagagcgccgtagggggcggagtcgtggggggtaaatcccggacccggggaatccccgtcccccaacatgtccagatcgaaatcgtctagcgcgtcggcatgcgccatcgccacgtcctcgccgtctaagtggagctcgtcccccaggctgacatcggtcgggggggccgtcgacagtctgcgcgtgtgtcccgcggggagaaaggacaggcgcggagccgccagccccgcctcttcgggggcgtcgtcgtccgggagatcgagcaggccctcgatggtagacccgtaattgtttttcgtacgcgcgcggctgtacgcgtgttcccgcatgaccgcctcggagggcgaggtcgtgaagctggaatacgagtccaacttcgcccgaatcaacaccataaatgcgggcctggttgccatgcagggtgggaggggtcgtcaacggcgcccctggctcctccgtagccgcgctgcgcaccagcgggaggttaaggtgctcgcgaatgtggtttagctcccgcagccggcgggcctcgattggcactccccggacggtgagcgctccgttgacgaacatgaagggctggaacagacccgccaactgacgccagctctccaggtcgcaacagaggcagtcaaacaggtcgggccgcatcatctgctcggcgtacgcggcccataggatctcgcgggtcaaaaatagatacaaatgcaaaaacagaacacgcgccagacgagcggtctctcggtagtacctgtccgcgatcgtggcgcgcagcatttctcccaggtcgcgatcgcgtccgcgcatgtgcgcctggcggtgcagctgccggacgctggcgcgcaggtaccggtacagggccgagcagaagttggccaacacggttcgatagctctcctcccgcgcccgtagctcggcgtggaagaaacgagagagcgcttcgtagtagagcccgaggccgtcgcgggtggccggaagcgtcgggaaggccacgtcgccgtgggcgcgaatgtcgatttgggcgcgttcggggacgtacgcgtccccccattccaccacatcgctgggcagcgttgataggaatttacactcccggtacaggtcggcgttggtcggtaacgccgaaaacaaatcctcgttccaggtatcgagcatggtacatagcgcggggcccgcgctaaagcccaagtcgtcgaggagacggttaaagagggcggcgggggggacgggcatgggcggggagggcatgagctgggcctggctcaggcgccccgttgcgtacagcggaggggccgccggggtgtttttgggacccccggccgggcgggggggtggtggcgaagcgccgtccgcgtccatgtcggcaaacagctcgtcgaccaagaggtccattgggtggggttgatacgggaaagacgatatcgggcttttgatgcgatcgtccccgcccgcccagagagtgtgggacgcccgacggcgcgggaagagaaaaacccccaaacgcgttagaggaccggacggaccttatggggggaagtgggcagcgggaaccccgtccgttcccgaggaatgacagcccgtggtcgccaccccgcatttaagcaacccgcacgggccgccccgtacctcgtgacttccccccacattggctcctgtcacgtgaaggcgaaccgagggcggctgtccaacccaccccccgccacccagtcacggtccccgtcggattgggaaacaaaggcacgcaacgccaacaccgaatgaacccctgttggtgctttattgtctgggtacggaagtttttcactcgacgggccgtctggggcgagaagcggagcgggctggggctcgaggtcgctcggtggggcgcgacgccgcagaacgccctcgagtcgccgtggccgcgtcgacgtcctgcaccacgtctggattcaccaactcgttggcgcgctgaagcaggtttttgccctcgcagaccgtcacgcggatggtggtgatgccaaggagttcgttgaggtcttcgtctgtgcgcggacgcgacatgtcccagagctggaccgccgccatccgggcatgcatggccgccaggcgcccgaccgcggcgcagaagacgcgcttgttaaagccggccacccggggggtccatggcgcgtcggggtttgggggggcggtgctaaagtgcagctttctggccagcccctgcgcgggtgtcttggatcgggttggcgccgtcgacgcgggggcgtctgggagtgcggcggattctggctgggccgatttcctgccgcgggtggtctccgccgccggggccgcgggggccttagtcgccacccgctgggttcggggggcccggggggcggtggtgggtgtgcgtccggcccctccggacccagcgggcggcggaggcgcccgcgcaggccccgggccggacaaaaccgccccggaaacgggacgccgcgtccgggggacctccgggtgttcgtcgtcttcggatgacgagcccccgtagagggcataatccgactcgtcgtactggacgaaacggacctcgcccctcgggcgcgcgcgtgtctgtagggcgccacggcgggaggtggcaggcggactatcgggactcgccatacatgaagacggggtgtagtacagatcctcgtactcatcgcgcggaacctcccgcggacccgacttcacggagcggcgagaggtcatggttccacgaacacgctagggtcggatgcgcggacaattaggcctgggttcggacggcggggggtggtgcaggtgtggagaggtcgagcgataggggcggcccgggagagaagagagggtccgcaaaacccactggggatgcgtgagtggccctctgtgggcggtgggggagagtcttataggaagtgcatataaccacaacccatgggtctaaccaatccccaggggccaagaaacagacacgccccaaacggtctcggtttccgcgaagaaggggaagtcctgggacaccctccacccccacccctcaccccacacagggcgggttcaggcgtgcccggcagccagtagcctctggcagatctgacagacgtgtgcgataatacacacgcccatcgaggccatgcctacataaaagggcaccagggcccccggggcagacatttggccagcgttttgggtctcgcaccgcgcgcccccgatcccatcgcgcccgccctcctcgccgggcggctccccgtgcgggcccgcgtctcccgccgctaaggcgacgagcaagacaaacaacaggcccgcccgacagacccttctgggggggcccatcgtccctaacaggaagatgagtcagtggggatccggggcgatccttgtccagccggacagcttgggtcgggggtacgatggcgactggcacacggccgtcgctactcgcgggggcggagtcgtgcaactgaacctggtcaacaggcgcgcggtggcttttatgccgaaggtcagcggggactccggatgggccgtcgggcgcgtctctctggacctgcgaatggctatgccggctgacttttgtgcgattattcacgcccccgcgctatccagcccagggcaccacgtaatactgggtcttatcgactcggggtaccgcggaaccgttatggccgtggtcgtagcgcctaaaaggacgcgggaatttgcccccgggaccctgcgggtcgacgtgacgttcctggacatcctggcgacccccccggccctcaccaagccgatttccctgcggcagttcccgcaactggcgcccccccctccaaccggggccgggatacgcgcagatccttggttggagggggcgctcggggacccaagcgtgactccggccctaccggcgcgacgccgagggcggtccctcgtctatgccggcgagctgacgccggttcagacggaacacggggacggcgtacgagaagccatcgccttccttccaaaacgcgaggaggatgccggtttcgacattgtcgtccgtcgcccggtcaccgtcccggcaaacggcaccacggtcgtgcagccatccctccgcatgctccacgcggacgccgggcccgcggcctgttatgtgttggggcggtcgtcgctcaacgcccgcggcctcctggtcgttcctacgcgctggctccccgggcacgtatgtgcgtttgttgtttacaaccttacgggggttcctgtgaccctcgaggccggcgccaaggtcgcccagctcctggttgcgggggcggacgctcttccttggatccccccggacaactttcacgggaccaaagcgcttcgaaactaccccaggggtgttccggactcaaccgccgaacccaggaacccgccgctcttggtgtttacgaacgagtttgacgcggaggcccccccgagcgagcgcgggaccgggggttttggctctaccggtatttagcccatagcttggggttcgttccgggcaataaaaaacgtttgtatctcatctttcctgtgtgtagttgtttctgttggaggcctgtgggtctatcacacccgcccctccatcccacaaacacagaacacacgggttggatgaaaacacgcatttattgacccaaaacacacggagctgctcgagatgggccagggcgaggtgcggttggggaggctgtaggtctgggaacggacacgcggggacacgattccggtttggggtccgggagggcgtcgccgtttcgggcggcaggcgccagcgtaacctccgggggcggcgtgtgggggtgccccaaggagggcgcctcggtcaccccaagcccccccaagcgggttcccccggcaaccccgaaggcggagaggccaagggcccgttcggcgatggccacatcctccatgaccacgtcgctctcggccatgctccgaatagcctgggagacgagcacatccgcggacttgtcagccgcccccacggacatgtacatctgcaggatggtggccatacacgtgtccgccaggcgccgcatcttgtcctgatgggccgccacggccccgtcgatcgtgggggcctcgagcccggggtggtggcgcgccagtcgttctaggttcaccatgcaggcgtggtacgtgcgggccaaggcgcgggccttcacgaggcgtcgggtgtcgtccagggaccccagggcgtcatcgagcgtgatgggggcgggaagtagcgcgttaacgaccaccagggcctcctgcagccgcggctccgcctccgagggcggaacggccgcgcggatcatctcatattgttcctcggggcgcgctccccagccacatatagccccgagaagagaagccatcgcgggcgggtactggcccttgggcgcgcggacgcaatggggcaggaagacgggaaccgcggggagaggcgggcggccgggactcccgtggaggtgaccgcgctttatgctaccgacgggtgcgttattacctcttcgatcgccctcctcacaaactctctactgggggccgagccggtttatatattcagctacgacgcatacacgcacgatggccgtgccgacgggcccacggagcaagacaggttcgaagagagtcgggcgctctaccaagcgtcgggcgggctaaatggcgactccttccgagtaaccttttgtttattggggacggaagtgggtgggacccaccaggcccgcgggcgaacccgacccatgttcgtctgtcgcttcgagcgagcggacgacgtcgccgcgctacaggacgccctggcgcacgggaccccgctacaaccggaccacatcgccgccaccctggacgcggaggccacgttcgcgctgcatgcgaacatgatcctggctctcaccgtggccatcaacaacgccagcccccgcaccggacgcgacgccgccgcggcgcagtatgatcagggcgcgtccctacgctcgctcgtggggcgcacgtccctgggacaacgcggccttaccacgctatacgtccaccacgaggcgcgcgtgctggccgcgtaccgcagggcgtattatggaagcgcgcagagtcccttctggtttcttagcaaattcgggccggacgaaaaaagcctggtgctcaccactcggtactacctgcttcaggcccagcgtctggggggcgcgggggccacgtacgacctgcaggccatcaaggacatctgcgccacctacgcgattccccacgccccccgccccgacaccgtcagcgccgcgtccctgacctcgtttgccgccatcacgcggttctgttgcacgagccagtacgcccgcggggccgcggcggccgggtttccgctttacgtggagcgccgtattgcggccgacgtccgcgagaccagtgcgctggagaagttcataacccacgatcgcagttgcctgcgcgtgtccgaccgtgaattcattacgtacatttacctggcccattttgagtgtttcagccccccgcgcctagccacgcatcttcgggccgtgacgacccacgaccccaaccccgcggccaacacggagcagccctcgcccctgggcagggaggccgtggaacaatttttttgccacgtgcgcgcccaactgaatatcggggagtacgtcaaacacaacgtgaccccccgggagaccgtcctggatggcgatacggccaaggcctacctgcgcgctcgcacgtacgcgcccggggccctgacgcccgcccccgcgtattgcggggccgtggactccgccaccaaaatgatggggcgtttggcggacgccgaaaagctcctggtcccccgcgggtggcccgcgtttgcgcccgccagtcccggggaggatacggcgggcggcacgccgcccccacagacctgcggaatcgtcaagcgcctcctgagactggccgccacggaacaacaggacaccacgcccccggcgatcgcggcgcttatccgtaatgcggcggtgcagactcccctgcccgtctaccggatatccatggtccccacgggacaggcatttgccgcgctggcctgggacgactgggcccgcataacgcgggacgctcgcctggccgaagcggtcgtgtccgccgaagcggcggcgcaccccgaccacggcgcgctgggcaggcggctcacggatcgcatccgcgcccagggccccgtgatgccccctggcggcctggatgccggggggcagatgtacgtgaatcgcaacgagatattcaacggcgcgctggcaatcacaaacatcatcctggatctcgacatcgccctgaaggagcccgtcccctttcgccggctccacgaggccctgggccactttaggcgcggggctctggctgcggttcagctcctgtttcccgcggcccgcgtggaccccgacgcatatccctgttattttttcaaaagcgcatgtcggcccggcccggcgtccgtgggttccggcagcggactcggcgacgacggggactggtttccctgctacgacgacgccggtgatgaggagtgggcggaggacccgggcgccatggacacatcccacgatcccccggacgacgaggttgcctactttgacctgtgccacgaagtcggccccacggcggaacctcgcgaaacggattcgcccgtgtgttcctgcaccgacaagatcggactgcgggtgtgcatgcccgtccccgccccgtacgtcgtccacggttctctaacgatgcggggggtggcacgggtcatccagcaggcggtgctgttggaccgagattttgtggaggccatcgggagctacgtaaaaaacttcctgttgatcgatacgggggtgtacgcccacggccacagcctgcgcttgccgtattttgccaaaatcgcccccgacgggcctgcgtgcggaaggctgctgccagtgtttgtgatcccccccgcctgcaaagacgttccggcgtttgtcgccgcgcacgccgacccgcggcgcttccattttcacgccccgcccacctatctcgcttccccccgggagatccgtgtcctgcacagcctgggtggggactatgtgagcttctttgaaaggaaggcgtcccgcaacgcgctggaacactttgggcgacgcgagaccctgacggaggtcctgggtcggtacaacgtacagccggatgcgggggggaccgtcgaggggttcgcatcggaactgctggggcggatagtcgcgtgcatcgaaacccactttcccgaacacgccggcgaatatcaggccgtatccgtccggcgggccgtcagtaaggacgactgggtcctcctacagctagtccccgttcgcggtaccctgcagcaaagcctgtcgtgtctgcgctttaagcacggccgggcgagtcgcgccacggcgcggacattcgtcgcgctgagcgtcggggccaacaaccgcctgtgcgtgtccttgtgtcagcagtgctttgccgccaaatgcgacagcaaccgcctgcacacgctgtttaccattgacgccggtacgccatgctcgccgtccgttccctgcagcacctctcaaccgtcgtcttgataacggcgtacggcctcgtgctcgtgtggtacaccgtcttcggtcacccccccaacgggggctggcgcaaccacgcccatatctgctacgccaatcttatcgcgggtagggtcgtgcccttccaggtcccacccgacgccatgaatcgtcggatcatgaacgtccacgaggcagttaactgtctggagaccctatggtacacacgggtgcgtctggtggtcgtagggtggttcctgtatctggcgttcgtcgccctccaccaacgccgatgtatgtttggtgtcgtgagtcccgcccacaagatggtggccccggccacctacctcttgaactacgcaggccgcatcgtatcgagcgtgttcctgcagtacccctacacgaaaattacccgcctgctctgcgagctgtcggtccagcggcaaaacctggttcagttgtttgagacggacccggtcaccttcttgtaccaccgccccgccatcggggtcatcgtaggctgcgagttgatgctacgctttgtggccgtgggtctcatcgtcggcaccgctttcatatcccggggggcatgtgcaatcacataccccctgtttctgaccatcaccacctggtgttttgtctccaccatcggcctgacagagctgtattgtattctgcggcggggcccggcccccaagaacgcagacaaggccgccgccccggggcgatccaaggggctgtcgggcgtctgcgggcgctgctgttccatcatcctctcgggcatcgcagtgcgattgtgttatatcgccgtggtggccggggtggtgctcgtggcgcttcactacgagcaggagatccagaggcgcctgtttgatgtatgacgtcacatccaggccggcggaaaccggaacggcatatgcaaattggaaactgtcctgtcttggggcccacccacccgacgcgtcatatgcaaatgaaaatcggtcccccgaggccacgtgtagcctggatcccaacgaccccgcccatgggtcccaattggccgtcccgttaccaagaccaacccagccagcatatccacccccgcccgggtccccgcggaagcggaacggtgtatgtgatatgctaattaaatacatgccacgtacttatggtgtctgattggtccttgtctgtgccggaggtggggcgggggccccgcccggggggcggaacgaggaggggtttgggagagccggccccggcaccacgggtataaggacatccaccacccggccggtggtggtgtgcagccgtgttccaaccacggtcacgcttcggtgcctctccccgattcgggcccggtcgctcgctaccggtgcgccaccaccagaggccatatccgacaccccagccccgacggcagccgacagcccggtcatggcgactgacattgatatgctaattgacctcggcctggacctctccgacagcgatctggacgaggacccacccgagccggcggagagccgccgcgacgacctggaatcggacagcagcggggagtgttcctcgtcggacgaggacatggaagacccccacggagaggacggaccggagccgatactcgacgccgctcgcccggcggtccgcccgtctcgtccagaagaccccggcgtacccagcacccagacgcctcgtccgacggagcggcagggccccaacgatcctcaaccagcgccccacagtgtgtggtcgcgcctcggggcccggcgaccgtcttgctcccccgagcagcacgggggcaaggtggcccgcctccaacccccaccgaccaaagcccagcctgcccgcggcggacgccgcgggcgtcgcaggggtcggggtcgcggtggtcccggggccgccgatggtttgtcggacccccgccggcgtgcccccagaaccaatcgcaacccggggggaccccgccccggggcggggtggacggacggccccggcgccccccatggcgaggcgtggcgcggaagtgagcagcccgacccacccggaggcccgcggacacggggcgtgcgccaagcaccccccccgctaatgacgctggcgattgcccccccgcccgcggacccccgcgccccggccccggagcgaaaggcgcccgccgccgacaccatcgacgccaccacgcggttggtcctgcgctccatctccgagcgcgcggcggtcgaccgcatcagcgagagctttggccgcagcgcacaggtcatgcacgacccctttggggggcagccgtttcccgccgcgaatagcccctgggccccggtgttggcgggccaaggagggccctttgacgccgagaccagacgggtctcctgggaaaccttggtcgcccacggcccgagcctctatcgcacttttgccggcaatcctcgggccgcatcgaccgccaaggccatgcgcgactgcgtgctgcgccaagaaaatttcatcgaggcgctggcctccgccgacgagacgctggcgtggtgcaagatgtgcatccaccacaacctgccgctgcgcccccaggaccccattatcgggacggccgcggctgtgctggataacctcgccacgcgcctgcggccctttctccagtgctacctgaaggcgcgaggcctgtgcggcctggacgaactgtgttcgcggcggcgtctggcggacattaaggacattgcatccttcgtgtttgtcattctggccaggctcgccaaccgcgtcgagcgtggcgtcgcggagatcgactacgcgacccttggtgtcggggtcggagagaagatgcatttctacctccccggggcctgcatggcgggcctgatcgaaatcctagacacacaccgccaggagtgttcgagtcgtgtctgcgagttgacggccagtcacatcgtcgcccccccgtacgtgcacggcaaatatttttattgcaactccctgttttaggtacaataaaaacaaaacatttcaaacaaatcgccccacgtgttgtccttctttgctcatggccggcggggcgtgggtcacggcagatggcgggggtgggcccggcgtacggcctgggtgggcggagggaactaacccaacgtataaatccgtccccgctccaaggccggtgtcatagtgcccttaggagcttcccgcccgggcgcatccccccttttgcactatgacagcgacccccctcaccaacctgttcttacgggccccggacataacccacgtggcccccccttactgcctcaacgccacctggcaggccgaaacggccatacacaccagcaaaacggactccgcttgcgtggccgtgcggagttacctggtccgcgcctcctgtgagaccagcggcacaatccactgctttttctttgcggtatacaaggacacccaccacacccctccgctgattaccgagctccgcaactttgcggacctggttaaccacccgccggtcctacgcgaactggaggataagcgcggggtgcggctgcggtgtgcgcggccgtttagcgtcgggacgattaaggacgtctctgggtccggcgcgtcctcggcgggagagtacacgataaacgggatcgtgtaccactgccactgtcggtatccgttctcaaaaacatgctggatgggggcctccgcggccctacagcacctgcgctccatcagctccagcggcatggccgcccgcgcggcagagcatcgacgcgtcaagattaaaattaaggcgtgatctccaacccccccatgaatgtgtgtaaccccccaaaaaaataaacagccgtaacccaatcaaaccaggcgtggtgtgagtttgtggacccaaagccctcagagacaacgcgacaggccagtatggaccgtgatacttttatttattaactcacaggggcgcttaccgccacaggaataccagaataatgaccaccactatcgcgaccaccccaaatacagcatggcgccccaccacgccacaacagccctgtcgccggtatggggcatgatcagacgagccgcgagccgcgcgttgggccctgtacagctcgcgcgaattgaccctaggaggccgccacgcgcccgagttttgcgttcgtcgctggtcgtcgggcgccaaagccccggacggctgttcggtcgaacgaacggccacgacagtggcataggttggggggtggtccgacatagcctcggtgtacgtcgggaggcccgacaagaggtcccttgagatgtcgggtggggccacaagcctggtttccggaagaaacaggggggttgccaataacccgccagggccaaaactccggcgctgcgcacgtcgttcggcgcggcgccgggcgcgccgagcggctcgctgggcggcttggcgtgagcggccccgctccgacgcctcgccctctccggaggaggttggcggaattggcacggacgacaggggcccagcagagtacggtggaggtgggtccgtgggggtgtccagatcaataacgacaaacggcccctcgttcctaccagacaagctatcgtaggggggcgggggatcagcaaacgcgttccccgcgctccatagacccgcgtcgggttgcgccgcctccgaagccatggatgcgccccaaagccacgactcccgcgcgctaggtccttggggtaagggaaaaggccctactccccatccaagccagccaagttaacgggctacgccttcggggatgggactggcaccccggcggattttgttgggctggtacgcgttgcccaaccgagggccgcgtccacgggacgcgccttttataaccccgggggtcattcccaacgatcacatgcaatctaactggctcccctctccccccctctcccctctccccccctctcccctctccccccctctcccctctccccccctctcccctctccccccctctcccctctccccccctctcccctctccccccctctcccctctccccccctctcccctctccccccctctcccctctccccccctctcccctctccccccctgctctttccccgtgacacccgacgctggggggcgtggctgccgggaggggccgcggatgggcggggcctactcggtctcccgcccccgcccccgaaccgccccgccggccttgcccccctttgatcccctgctacccccaacccgtgctcgtggtgcgggttgggtggggggggggagtgtgggcgggggtgtgcgggaggtgtcggtggtggtggtggtggtaggaatggtggtgaggggggggggcgctggttggtcaaaaaagggagggacgggggccggcagaccgacggcgacaacgctccccggcggccgggtcgcggctcttacgagcggcccggcccgcgctcccaccccccgggccgtgtccttgctttccccccgtctccccccccctccttctcctcctcctcctcctcgtttttccaaaccccgcccacccggcccggcccggcccggccaccgccgcccacccacccacctcgggagacccagccccggtcccccgttccccgggggccgttatctccagcgccccgtccggcgcgccgccccccgccgctaaaccccatcccgcccccgggaccccacatataagcccccagccacacgcaagaacagacacgcagaacggctgtgtttatttaaataaaccgatgtcggaataaacaaacacaaacacccgcgacggggggacggagggaggggggtgacgggggacgggaacagccacaaaaaacacccacaaaaaaaaacagccacccccgacacccccccccacccccagtctcttcgccttttcccccccaccccacgcccccactgagcccggtcgatcgacgagcacccccgcccccgcccctgccccggcgacccccggcccgcacgatcccgacaacaataacaaccccaacggaaagcggcggggtgtgggggggggcgaggaacaaccgaggggaacgggggatggaaggacgggaagtggaagtcctgatacccatcctacacccccctgccttccaccctccggccccccgcgagtccacccgccggccggctaccgagaccgaacacggcggccgccgcagccgccgcagccgccgccgacaccgcagagccggcgcgcgcacacacaagcggcagaggcagaaaggcccagagtcattgtttatgtggccgcgggccagcagacggcccgcgacacccccccccccgcccgtgtgggtatccggccccccgccccgcgccggtccattaagggcgcgcgtgcccgcgagatatcaatccgttaagtgctctgcagacaggggcaccgcgcccggaaatccattaggccgcagacgaggaaaataaaattacatcacctacccacgtggtgctgtggcctgtttttgctgcgtcatctgagcctttataaaagcgggggcgcggccgtgccgatcgcgggtggtgcgaaagactttccgggcgcgtccgggtgccgcggctctccgggcccccctgcagccggggcggccaaggggcgtcggcgacatcctccccctaagcgccggccggccgctggtctgttttttgttttccccgtttcgggggtggggggggttgcggtttctgtttctttaacccgtctggggtgtttttcgttccgtcgccggaatgtttcgttcgtctgtcccctcacggggcgaaggccgcgtacggcccgggacgagggggcccccgaccgcggcggtccgggccccgtccgggcccgctcgccggcacgcgacgcgaaaaaggccccccggaggcttttccgggttcccggcccggggcctgagataaacaatcggggttaccgccaacggccggcccccgtggcggcccggcccggggccccggcggacccaaggggccccggcccggggccccacaacggcccggcgcatgcgctgtggtttttttttctcggtgttttgtcgggctccgtcgcctttcctgttctcgcttctccccccccccccttcttcacccccagtaccctcctccctcccttcctcccccgttatcccactcgtcaagggcgccccggtgtggttcaacaaagacgccgcgtttccaggtaggttagacacctgcttctccccaatagaggggggggacccaaacgacagggggcgccccagaggctaaggtcggccacgccactcgcgggtgggctcgtgttacagcacaccagcccgttcttttccccccctcccacccttagtcagactctgttacttacccgtccgaccaccaactgcccccttatctaagggccggctggaagaccgccagggggtcggccggtgtcgctgtaaccccccacgccaatgacccacgtactccaagaaggcatgtgtcccaccccgcctgtgtttttgtgcctggctctctatgcttgggtcttactgccgggggggggggagtgcgggggagggggggtgtggaaggaaatgcacggcgcgtgtgtaccccccctaaagttgttcctaaagcgaggatatggaggagtggcgggtgccgggggaccggggtgatctctggcacgcgggggtgggaagggtcgggggaggggggatggggtaccggcccacctggccgacgcgggtgcgcgtgcctctgcacaccaaccccacgtcccccggcggtctctaagaagcaccgccccccctccttcataccaccgagcatgcctgggtgtgggttggtaaccaacacgcccatcccctcgtctcctgtgattctctggctgcaccgcattcttgttttctaactatgttcctgtttctgtctccccccccacccctccgccccaccccccaacacccacgtctgtggtgtggccgacccccttttgggcgccccgtcccgccccgccacccctcccgtcctttgttgccctatagtgtagttaacccccccccgccctttgtggcggccagaggccaggtcagtccgggcgggcaggcgctcgcggaaacttaacacccacacccaacccactgtggttctggctccatgccagtggcaggatgctttcggggatcggtggtcaggcagcccgggccgcggctctgtggttaacaccagagcctgcccaacatggcacccccactcccacgcacccccactcccacgcacccccactcccacgcacccccactcccacgcacccccactcccacgcacccccactcccacgcacccccactcccacgcacccccactcccacgcacccccactcccacgcacccccgagatccatccaacacagacagggaaaagatacaaaagtaaacctttatttcccaatagacagcaaaaatcccctgagttttttattagggccaacactaaagacccgctggtgtgtggtgcccgtgtctttcacttttcccctccccgacacggattggctggtgtagtgggcgcggccagagaccacccagcgcccgacccccccctccccacaaacacggggggcgtcccttattgttttccctcgtcccgggtcgacgccccctgctccccggaccacgggtgccgagaccgcaggctgcggaagtccagggcgcccactagggtgccctggtcgaacagcatgttccccacgggggtcatccagaggctgttccactccgacgcgggggccgtcgggtactcggggggcatcacgtggttacccgcggtctcggggagcagggtgcggcggctccagccggggaccgcggcccgcagccgggtcgccatgtttcccgtctggtccaccaggaccacgtacgccccgatgttccccgtctccatgtccaggatgggcaggcagtcccccgtgatcgtcttgttcacgtaaggcgacagggcgaccacgctagagacccccgagatgggcaggtagcgcgtgaggccgcccgcgggggcggccccggaagtctccgcgtggcgcgtcttccgggcacacttcctcggcccccgcggcccagaagcagcgcgggggccgagggaggtttcctcttgtctccctcccagggcaccgacggccccgcccgaggaggcggaagcggaggaggacgcggccccggcggcggaagaggcggcccccgcgggagtcggggccgaggaggaagaggcagaggaggaagaggcggaggccgccgaggacgtcaggggggtcccgggcccaccctggccgcgcccccccggccctgagtcggagggggggtgcgtcgccgccctcttggcccctgccggcgcgagggggggacgcgtggactggggggaggggttttcctggcccgacccgcgcctcttcctcggacgcaccgccgcctcctgctcgacagaggcggcggaggggagcgggggggcgccggagggggcggcgccgcgggagggcccgtgtccaccctccacgcccggcccccccgagccgcgcgccaccgtcgcacgcgcccggcacagactctgttcttggttcgcggcctgagccagggacgagtgcgactggggcacacggcgcgcgtccgcgggggccggggcgcgggggccgggccccggaggcggcgctcgcacgcacggggccacggccgcgcgggggcgcgcgggtcccgacgcggccgaggacgcggtgggcccggggcggggggcggagcctggcatgggcgccgcggggggcctgtggggagaggccgggggggagtcgctgatcactatggggtctctgttgtttgcaaggggggcgggtctgttgacaagggggcccgtccggcccctcggccgccccgcctccgcttcaacaaccccaaccccaaccccaacccccccggaggggccagacgccccccgcggcgccgcggctcgcgactggcgggagccgccgccgccgccgctgctgttggtggtggtgttggtgttactgctgccgtgtggcccgatgggcgccgaggggggcgctgtccgagccgcggccggctggggggctgcgtgagacgccccgcccgtcacggggggcgcggcggcgcctctgcgtgggggggcgcggggcgtccggcggggggcgggcggtacgtagtctgctgcaagagacaacggggggcgcgatcaggttacgccccctcccaggccctccctttccgcgcccgccctttcctcgcccccccgcccgcctattcctccctcccccctcctcctcctcctcccccagggtcctcgccgcccccccgcctcaccgtcgtccaggtcgtcgtcatcctcgtccgtggtgggctcagggtgggtgggcgacagggccctcaccgtgtgcccccccagggtcaggtaccgcggggcgaaccgctgattgcccgtccagataaagtccacggccgtgcccgccctgacggcctcctcggcctccatgcgggtctgggggtcgttcacgatcgggatggtgctgaacgacccgctgggcgtcacgcccactatcaggtacaccagcttggcgttgcacagcgggcaggtgttgcgcaattgcatccaggttttcatgcacgggatgcagaagcggtgcatgcacgggaaggtgtcgcagcgcaggtggggcgcgatctcatccgtgcacacggcgcacacgtcgccctcgtcgctccccccgtcctctcgagggggggcgcccccgcaactgccggggtcttcctcgcggggggggctcccccccgagaccgcccccccatccacgccctgcggccccagcagccccgtctcgaacagttccgtgtccgtgctgtccgcctcggaggcggagtcgtcgtcatggtggtcggcgtccccccgcccccccacttcggtctccgcctcagagtcgctgctgtccggcaggtctcggtcgcagggaaacacccagacatccggggcgggctaaggggaaaaaaaggggggcgggtaagaatggggggatttcccgcgtcaatcagcgcccacgagttccccctctccccccccccgcctcacaaagtcctgcccccctgctggcctcggaagaggggggagaaaggggtctgcaaccaaaggtggtctgggtccgtcctttggatcccgacccctcttcttccctcttctcccgccctccagacgcaccggagtcgggggtcccacggcgtcccccaaatatggcgggcggctcctccccacccccctagatgcgtgtgagtaagggggccctgcgtatgagtcagtggggaccacgccccctaacacggcgaccccggtccctgtgtgtttgttgtgggggcgtgtctctgtgtatgagtcagggggtcccacggcgaccccgggccctgcgtctgagtcaaaggggccatgtgtatgtgttggggggtctgtatatataaagtcagggggtcacatggcgacccccaacagggcgaccccggtccctgtatatatagggtcagggggttccgcgccccctaacatggcgcccccggtccctgtatatatagtgtcacggggttccacgccccctaacatggcgcccggctcccgtgtatgagtgggggtcccccaacatggcggccggttccagtgtaagggtcgggggtcccccaacatggcgccccccaatatggcgccccccaatatggcgccccagacatggcgcccggcccctcacctcgcgctgggggcggccctcaggccggcgggtactcgctccggggcggggctccatgggggtcgtatgcggttggagggtcgcggacggagggtccctgggggtcgcaacgtaggcggggcttctgtggtgatgcggagagggggcggcccgagtctgcctggctgctgcgtctcgctccgagtgccgaggtgcaaatgcgaccagactgtcgggccagggctaacttataccccacgcctttcccctccccaaaggggcggcagtgacgattcccccaatggccgcgcgtcccaggggaggcaggcccaccgcggggcggccccgtccccggggaccaacccggcgcccccaaagaatatcattagcatgcacggcccggcccccgatttgggggaccaacccggtgtcccccaaagaaccccattagcatgcccctcccaccgacgcaacaggggcttggcctgcgtcggtgccccggggcttcccgccttcccgaagaaactcattaccatacccggaaccccaggggaccaatgcgggttcattgagcgacccgcgggccaatgcgcgaggggccgtgtgttccgccaaaaaagcaattagcataacccggaaccccaggggagtggttacgcgcggcgcgggaggcggggaataccggggttgcccattaagggccgcgggaattgccggaagcgggaagggcggccggggccgcccattaatgagtttctaattaccataccgggaagcggaacaaggcctcttgtaagtttttaattaccataccgggaagtgggcggcccggcccactgggcggtaactcccgcccagtgggccgggccccgaagactcggcggacgctggttggccgggccccgccgcgctggcggccgccgattggccagtcccgccctccgagggcgggcccgcctcgggggcgggccggctcccagcgtatatatgcgcggctcctgccatcgtctctccggagagcggcttggtgcggagctcccgggagctccgcggaagacccaggccgcctcgggtgtaacgttagaccgagttcgccgggccggctccgcgggccagggcccgggcacgggcctcgggccccaggcacggcccgatgaccgcctcggcctccgccacccggcgccggaaccgagcccggtcggcccgctcgcgggcccacgagccgcggcgcgccaggcgggcggccgaggcccagaccaccaggtggcgcacccggacgtggggcgagaagcgcacccgcgcgggggtcgcgggggtcgcgggggtcgcgggggtcgcgggggtcgcggggggctccggcgccccctccccgcccgcgcgtcgcaggcgcaggcgcgccaggtgctctgcggtgacgcgcaggcggagggcgaggcgcggcggaaggcggaaggggcgtgagggggggtgggaggggttagccccgccccccgggcccgcgccgggcggtggggaccgggggcggggggcggcggcggtgggccgggcctctggcgccggctcgggcggggggctgtccggccagtcgtcgtcatcgtcgtcgtcggacgcggactcgggaacgtggagccactggcgcagcagcagcgaacaagaaggcgggggcccactggcggggggcggcggcggggcggccgcgggcgcgctcctgaccgcgggttccgagttgggcgtggaggttacctgggactgtgcggttgggacggcgcccgtgggcccgggcggccgggggcggcgggggccgcgatggcggcggcggcgggccatggagacagagagcgtgccggggtggtagagtttgacaggcaagcatgtgcgtgcagaggcgagtagtgcttgcctgtctaactcgctcgtctcggccgcggggggcccgggctgcgccgccgcgctttaaagggccgcgcgcgacccccggggggtgtgtttcggggggggcccgttttccgctcctccccccgctcctccccccgctcctccccccgctcctccccccgctcctccccccgctcctccccccgctcctccccccgctcctccccccgctcctccccccgctcctccccccgctcctccccccgctcctccccccgctcctccccccgctcctccccccgctcctccccccgctcctccccccgctcctccccccgctcctccccccgctccccaacgcccgccgcgcgcgcgcacgccgcccggaccgccgcccgccttttttgcgcgccgccccgcccgcggggggcccgggctgccacaggtgtaacaacaccaacagaacaccaacagcacggcgcaccggcgactccggttcctcatccacacgtcacacgtcacgtcatccaccacacctgcccaccaacacaactcacagcgacaactcaccgcgcaacaactcctgttcctcatccacacgtcaccgcgcaccccccgctcctccagacgtcccccagcgcaacacgccgctcctgtcacacaccaccgccccagccctccccagccccagccctccccagccccagccctccccggccccagccctccccggccccagccctccccggccccagccctccccggccccagccctccccggccccagccctccccggccccagccctccccggccgcgtcccgcgctccctcgggggggttcgggcatctctacctcagtgccgccaatctcaggtcagagatccaaaccctccgggggcgcccgcgcaccaccaccgcccctcgccccctcccgcccctcgccccctcccgcccctcgccccctcccgcccctcgccccctcccgcccctcgccccctcccgcccctcgccccctcccgcccctcgccccctcccgcccctcgccccctcccgcccctcgccccctcccgcccctcgccccctcccgcccctcgccccctcccgcccctcgccccctcccgcccctcgccccctcccgcccctcgccccctcccgcccctcgccccctcccgcccctcgccccctcccgcccctcgccccctcccgcccctcgccccctcccgcccctcgccccctcccgcccctcgaaataaacaacgctactgcaaaactaaatcaggtcgttgtcgtttattgcgtcttcgggtttcgcaagcgccccgccccgtcccggcccgttacagcaccccgtccccctcgaacgcgccgccgtcgtcgtcgtcccaggcgccttcccagtccacaacttcccgtcgcgggggcgtggccaagcccgcctccgcccccagcacctccacggcccccgccgccgccagcacggtgccgctgcggcccgtggccgaggcccagcgaatcccgggcaacgccggcggcagggcccccgggccgtcgtcgtcgtcgtcgccgccgcgcagcaccagcgggggggcgtcgtcgtcgggctccagcagggcgcgggcgcaaaagtccctccgcggcccgcgccaccgggccgggccggcgcgcaccgcctcgcgccccagcgccacgtacacgggccgcagcggcgcgcccaggccccagcgcgcgcaggcgcggtgcgagtgggcctcctcctcgcagaagtccggcgcgccgggcgccatggcgtcggtggtccccgaggccgccgcccggccgtccagcgccggcagcacggcccggcggtactcgcgcggggacatgggcaccggcgtgtccgggccgaagcgcgtgcgcacgcggtagcgcacgttgccgccgcggcacaggcgcagcggcggcgcgtcggggtacaggcgcgcgtgcgcggcctccacgcgcgcgaagacccccgggccgaacacgcggcccggggccagcaccgtgcggcgcaggtcccgcgccgccggccagcgcacggcgcactgcacggcgggcagcaggtcgcacgccaggtaggcgtgctgccgcgacaccgcgggcccgtcggcgggccagtcgcaggcgcgcacggtgttgaccacgatgagccgccggtcgccggcgctggcgagcagccccagaaactccacggccccggcgaaggccaggtcccgcgtggacagcagcagcacgccctgcgcgcccagcgccgacacgtcgggggcgccggtccagttgcccgcccaggcggccgtgtccggcccgcacagccggttggccagggccgccagcaggcaggacagcccgccgcgctcggcggaccactccggcggcccccccgaggccccgccgccggccaggtcctcgcccggcagcggcgagtacagcaccaccacgcgcacgtcctcggggtcggggatctggcgcatccaggccgccatgcggcgcagcgggcccgaggcgcgcagggggccaaagaggcggcccccggcggccccgtgggggtgggggttatcgtcgtcgtcgccgccgccgcacgcggcctgggcggcggcggcgggcccggcgcaccgcgcggcgatcgaggccagggcccgcgggtcaaacatgagggccggtcgccaggggacggggaacagcgggtggtccgtgagctcggccacggcgcgcggggagcagtaggcctccagggcggcggccgcgggcgccgccgtgtggctgggccccgggggctgccgccgccagccgcccagggggtcggggccctcggcgggccggcgcgacagcgccacggggcgcgggcgggcctgcgccgcggcggcccggggcgccgcgggctgggcgggggcgggctcgggccccgggggcgtggaggggggcgcggggaggggggcgcgggcgtccgagccgggggcgtccgcgccgctcttcttcgtcttcgggggtcgcgggccgccgcctccgggcggccgggccgggccgggactcttgcgcttgcgcccctcccgcggcgcggcggaggcggcggcggccgccagcgcgtcggcggcgtccggtgcgctggcggccgccgccagcagggggcgcaggctctggttctcaaacagcaggtccgcggcggcggcggccgcggagctcggcaggcgcgggtcccgcggcagcgcggggcccagggccccggcgaccaggctcacggcgcgcacggcggccacggcggcctcgctgccgccggccacgcgcaggtccccgcgcaggcgcatgagcaccagcgcgtcgcgcacgaaccgcagctcgcgcagccacgcgcgcaggcggggcgcgtcggcgtgcggcggcggcggggaagcggggcccgcgggtccctccggccgcggggggctggcgggccgggccccggccagccccgggacggccgccaggtcgccgtcgaagccctcggccagcgcctccaggatcccgcggcaggcggccaggcactccacggccacgcggccggcctgggcgcggcgcccggcgtcgtcgtcggcgtcggcgtggcgggcggcgtcggggtcgtcgccccccgcgggggaggcgggcgcggcggacagccgccccagggcggcgaggatccccgcggcgccgtacccggcgggcaccgcgcgctcgcccggtgcggcggcggcggcgacgacggcggcggcgaccccctcgtcatctgcgccggcgccggggctccccgcggcccccgtcagcgccgcgttctcgcgcgccaacaggggcgcgtaggcgcggcgcaggctggtcagcaggaagcccttctgcgcgcggtcgtatcggcggctcatggccacggcggccgccgcgtgcgccaggccccagccgaagcggccggccgccatggcgtagcccaggtggggcacggcccgcgccacgctgccggtgatgaaggagctgctgttgcgcgcggcgcccgagatccggaagcaggcctggtccagcgccacgtccccggggaccacgcgcgggttctggagccaccccatggcctccgcgtccggggtgtacagcagccgcgtgatcagggcgtactgctgcgcggcgtcgcccagctcgggcgcccacacggccgccggggcgcccgaggcctcgaaccggcgtcgcgcctcctccgcctcgggcgccccccagaggcccgggcggctgtcgcccaggccgccgtacagcacccgccccgggggcgggggcccggcgccgggccacggctccccgctgacgtacccgtcgcgatagcgcgcgtagaaggcgccggaggccgcgtcggcgtccagctcgacccgccggggctgcccggccgtgaagcggcccgtggcgtcgcggccggccaccgccgcgcgggcccggcggcgctcgatgcggcccgcggaggccgcgggggtcctcgccgccgcccggggcttgggcgcggcctcggagagggggggtggcccgggcgggggcggcgtccgcccgggggcttccggcgccgcgctcgacggaccccgcccgacggcccgcgcctcgcgtgcgcggtcggccgcgtcgttgccgtcgtcgtcctcgtcctcgtcggacgacgaggacgaagaggatgcggacgacgaggacgaggacccggagtccgacgaggtcgatgacgccgatggccgccgccggccgtgacgacgtctccgcggcggctgggccggcgggcgcggcgacaggcggtccgtggggtccggatacgcgccgcgtagcggggcctcccgtgcgcggccccgggccggggcccggtcgccggcggcgtcggctgcgtcgtcgtactcgtccccgtcatcgtcgtcggctcgaaaggcgggggtccggggcggcgaggccgcggggtcgggcgtcgggatcgtccggacggcctcctctaccatggaggccagcagggccagctgtcgcggcgagacggcgtccccggcgtcctcgccggcgtcggtgcccgccgcgggggccctcccgtcccgccgggcgtcgtcgaggtcgtgggggtggtcggggtcgtggtcggggtcgtccccgccctcctccgtctccgcgccccacccgagggccccccgctcgtcgcggtctgggctcggggtgggcggcggcccgtcggtggggcccggggagccggggcgctgcttgttctccgacgccatcgccgatgcggggcgatcctccggggatacggctgcgacggcggacgtagcacggtaggtcacctacggactctcgatggggagggggcgagacccacggaccccgacgacccccgccgtcgacgcggaactagcgcggaccggtcgatgcttgggtgggaaaaaggacagggacggccgatccccctcccgcgcttcgtccgcgtatcggcgtcccggcgcggcgagcgtctgacggtctgtctctggcggtcccgcgtcgggtcgtggatccgtgtcggcagccgcgctccgtgtggacgatcggggcgtcctcgggctcatatagtcccaggggccggcgggaaggaggagcagcggaggccgccggccccccgccccccaggcgggcccgccccgaacggaattccattatgcacgaccccgccccgacgccggcacgccgggggcccgtggccgcggcccgttggtcgaacccccggccccgcccatccgcgccatctgccatgggcggggcgcgagggcgggtgggcccgcgccccgccccgcatggcatctcattaccgcccgatccggtggtttccgcttccgttccgcatgctaacgaggaacgggccgggggcggggcccgggccccgacttcccggttcggcggtaatgagatacgagccccgcgcgcccgttggccgtccccgggcccccggtcccgcccgccggacgttgggaccaacgggacggcgggcggcccaagggccgcccgccttgccgcccccccattggccggcgggcgggaccgccccaagggggcggggccgccgggtaaaagaagtgagaacgcgaagcgttcgcacttcgtcccaatatatatatattattagggcgaagtgcgagcactggcgccgtgcccgactccgcgccggccccgggggcgggcccgggcggcggggggcgggtctctccggcgcacataaaggcccggcgcgaccgacgcccgcagacggcgccggccacgaacgacgggagcggctgcggagcacgcggaccgggagcgggactcgcagagggccgtcggagcggacggcgtcggcatcgcgacgccccggctcgggatcgggatcgcatcggaaagggacacgcggaaagacccacccaccccacccacgaaacacaggggacgcaccccgggggcctccgacgacagaaacccaccggtccgcctttgtgcacgggtaagcaccttgggtgggcggaggagggggggacgcgggggcggaggaggggggacgcgggggcggaggaggggggacgcgggggcggaggaggggggacgcgggggcggaggaggggggacgcgggggcggaggagggggctcacccgcgttcgtgccttcccgcaggaggaacgtcctcgtcggggcgaccggcggcgaccgttgcgtggaccgcttcctgctcgtcgggcggggggaagccactgtggtcctccgggacgttttctggatggccgacatttccccaggcgcttttgcgccttgtgtaaaagcgcggcgtcccgctctccgatccccgcccctgggcacgcgcaagcgcaagcgcccttcccgccccctctcatcggagtctgaggtagaatccgatacagccttggagtctgaggtcgaatccgagacagcatcggattcgaccgagtctggggaccaggatgaagccccccgcatcggtggccgtagggccccccggaggcttggggggcggttttttctggacatgtcggcggaatccaccacggggacggaaacggatgcgtcggtgtcggacgaccccgacgacacgtccgactggtcttatgacgacattcccccacgacccaagcgggcccgggtaaacctgcggctcacgagctctcccgatcggcgggatggggttatttttcctaagatggggcgggtccggtctacccgggaaacgcagccccgggcccccaccccgtcggccccaagcccaaatgcaatgctacggcgctcggtgcgccaggcccagaggcggagcagcgcacgatggacccccgacctgggctacatgcgccagtgtatcaatcagctgtttcgggtcctgcgggtcgcccgggacccccacggcagtgccaaccgcctgcgccacctgatacgcgactgttacctgatgggatactgccgagcccgtctggccccgcgcacgtggtgccgtttgctgcaggtgtccggcggaacctggggcatgcacctgcgcaacaccatacgggaggtggaggctcgattcgacgccaccgcggaacccgtgtgcaagcttccttgtttggagaccagacggtacggcccggagtgtgatcttagtaatctcgagattcatctcagcgcgacaagcgatgatgaaatctccgatgccaccgatctggaggccgccggttcggaccacacgctcgcgtcccagtccgacacggaggatgccccctcccccgttacgctggaaaccccagaaccccgcgggtccctcgctgtgcgtctggaggatgagtttggggagtttgactggaccccccaggagggctcccagccctggctgtctgcggtcgtggccgataccagctccgtggaacgcccgggcccatccgattctggggcgggtcgcgccgcagaagaccgcaagtgtctggacggctgccggaaaatgcgcttctccaccgcctgcccctatccgtgcagcgacacgtttctccggccgtgagtccggtcgccccgacccccttgtatgtccccaaataaaagaccaaaatcaaagcgtttgtcccagcgtcttaatggcgggaagggcggagagaaacagaccacgcgtacatggggggtgtttgggggtttattgacatcggggctacagggtggtaaccggatagcagatgtgaggaagtctgggccgttcgccgcgaacggcgatcagagggtccgtttcttgcggaccacggcccggtgatgtgggttgctcgtctgggatctcgggcatgcccatacacgcacaacacggacgccgcaccggatgggacgtcgtaagggggcctggggtagctgggtggggtttgtgcagagcaatcagggaccgcagccagcgcatacaatcgcgctcccgtccgtttgtcccgggcagtaccacgccgtactggtattcgtaccggctgagcagggtctccagggggtggttgggggccgcggggaacggggtccacgccacggtccactcgggcaaaaaccgagtcggcacggcccacggttctcccacccacgcgtctggggtcttgatggcgataaatcttaccccgagccggattttttgggcgtattcgagaaacggcacacacagatccgccgcgcctaccacccacaagtggtagaggcgaggggggctgggttggtctcggtgcagcagtcggaagcacgccacggcgtccacgacctcggtgctctccaaggggctgtcctccgcaaacaggcccgtggtggtgtttggggggcagcgacaggacctagtgcgcacgatcgggcgggtgggtttgggtaagtccatcagcggctcggccaaccgtcgaaggttggccggacgaacgacgaccggggtacccaggggttctgatgccaaaatgcggcactgcctaaacaggaagctccacagggccgggcttgcgtcgacggaagtccggggcagggcgttgttctggtcaaggagggtcattacgttgacgacaacaacgcccatgttggtatattacaggcccgtgtccgatttggggcacttgcagatttgtaaggccacgcacggcggggagacaggccgacgcgggggctgctctaaaaatttaagggccctacggtccacagacccgccttcccgggggggcccttggagcgaccggcagcggaggcgtccgggggaggggagggtgatttacgggggggtaggtcagggggtgggtcgtcaaactgccgctccttaaaaccccggggcccgtcgttcggggtgctcgttggttggcactcacggtgcggcgaatggcctgtcgtaagttttgtcgcgtttacgggggacagggcaggaggaaggaggaggccgtcccgccggagacaaagccgtcccgggtgtttcctcatggccccttttataccccagccgaggacgcgtgcctggactccccgcccccggagacccccaaaccttcccacaccacaccacccggcgatgccgagcgcctgtgtcatctgcaggagatcctggcccagatgtacggaaaccaggactaccccatagaggacgaccccagcgcggatgccgcggacgatgtcgacgaggacgccccggacgacgtggcctatccggaggaatacgcagaggagctttttctgcccggggacgcgcccggtccccttatcggggccaacgaccacatccctcccccgtgtggcgcatctccccccggtatacgacgacgcagccgggatgagattggggccacgggatttaccgcggaagaactggacgccatggacagggaggcggctcgagccatcagccgcggcggcaagcccccctcgaccatggccaagctggtgactggcatgggctttacgatccacggagcgctcaccccaggatcggaggggtgtgtctttgacagcagccacccagattacccccaacgggtaatcgtgaaggcggggtggtacacgagcacgagccacgaggcgcgactgctgaggcgactggaccaccccgcgatcctgcccctcctggacctgcatgtcgtctccggggtcacgtgtctggtcctccccaagtaccaggccgacctgtatacctatctgagtaggcgcctgaacccgctgggacgcccgcagatcgcagcggtctcccggcagctcctaagcgccgttgactacattcaccgccagggcattatccaccgcgacattaagaccgaaaatatttttattaacacccccgaggacatttgcctgggggactttggtgccgcgtgcttcgtgcagggttcccgatcaagccccttcccctacggaatcgccggaaccatcgacaccaacgcccccgaggtcctggccggggatccgtataccaccaccgtcgacatttggagcgccggtctggtgatcttcgagactgccgtccacaacgcgtccttgttctcggccccccgcggccccaaaaggggcccgtgcgacagtcagatcacccgcatcatccgacaggcccaggtccacgttgacgagttttccccgcatccagaatcgcgcctcacctcgcgctaccgctcccgcgcggccgggaacaatcgcccgccgtacacccgaccggcctggacccgctactacaagatggacatagacgtcgaatatctggtttgcaaagccctcaccttcgacggcgcgcttcgccccagcgccgcagagctgctttgtttgccgctgtttcaacagaaatgaccgcccccagggggcggtgctgtttgcgggttggcacaaaaagaccccgacccgcgtctgtggtgtttttggcatcatgtcgccgggcgccatgcgtgccgttgttcccattatcccattccttttggttcttgtcggtgtatcgggggttcccaccaacgtctcctccaccacccaaccccaactccagaccaccggtcgtccctcgcatgaagcccccaacatgacccagaccggcaccaccgactctcccaccgccatcagccttaccacgcccgaccacacaccccccatgccaagtatcggactggaggaggaggaagaggaggagggggccggggacggcgaacatcttgaggggggagatgggacccgtgacaccctaccccagtccccgggcccagccttcccgttggctgaggacgtcgagaaggacaaacccaaccgtcccgtagtcccatcccccgatcccaacaactcccccgcgcgccccgagaccagtcgcccgaagacaccccccaccattatcgggccgctggcaactcgccccacgacccgactcacctcaaagggacgacccttggttccgacgcctcaacataccccgctgttctcgttcctcactgcctcccccgccctggacaccctcttcgtcgtcagcaccgtcatccacaccttatcgtttttgtgtattggtgcgatggcgacacacctgtgtggcggttggtccagacgcgggcgacgcacacaccctagcgtgcgttacgtgtgcctgccgtccgaacgcgggtagggtatggggcgggggatggggagagcccacacgcggaaagcaagaacaataaaggcggtggtatctagttgatatgcatctctgggtgtttttggggtgtggcggacgcggggcggtcattggacggggtgcagttaaatacatgcccgggacccatgaagcatgcgcgacttccgggcctcggaacccacccgaaacggccaacggacgtctgagccaggcctggctatccggagaaacagcacacgacttggcgttctgtgtgtcgcgatgtctctgcgcgcagtctggcatctggggcttttgggaagcctcgtgggggctgttcttgccgccacccatcggggacctgcggccaacacaacggaccccttaacgcacgccccagtgtcccctcaccccagccccctggggggctttgccgtccccctcgtagtcggtgggctgtgcgccgtagtcctgggggcggcgtgtctgcttgagctcctgcgtcgtacgtgccgcgggtgggggcgttaccatccctacatggacccagttgtcgtataatttcccccccccccccccttctccgcatgggtgatgtcgggtccaaactcccgacaccaccagctggcatggtataaatcaccggtgcgccccccaaaccatgtccggcagggggatgggggggcgaatgcggagggcacccaacaacaccgggctaaccaggaaatccgtggccccggcccccaataaagatcgcggtagcccggccgtgtgacactatcgtccataccgaccacaccgacgaatcccctaagggggaggggccattttacgaggaggaggggtataacaaagtctgtctttaaaaagcaggggttagggagttgttcggtcataagcttcagcgcgaacgaccaactaccccgatcatcagttatccttaaggtctcttttgtgtggtgcgttccggtatggggggggctgccgccaggttgggggccgtgattttgtttgtcgtcatagtgggcctccatggggtccgcggcaaatatgccttggcggatgcctctctcaagatggccgaccccaatcgctttcgcggcaaagaccttccggtcctggaccagctgaccgaccctccgggggtccggcgcgtgtaccacatccaggcgggcctaccggacccgttccagccccccagcctcccgatcacggtttactacgccgtgttggagcgcgcctgccgcagcgtgctcctaaacgcaccgtcggaggccccccagattgtccgcggggcctccgaagacgtccggaaacaaccctacaacctgaccatcgcttggtttcggatgggaggcaactgtgctatccccatcacggtcatggagtacaccgaatgctcctacaacaagtctctgggggcctgtcccatccgaacgcagccccgctggaactactatgacagcttcagcgccgtcagcgaggataacctggggttcctgatgcacgcccccgcgtttgagaccgccggcacgtacctgcggctcgtgaagataaacgactggacggagattacacagtttatcctggagcaccgagccaagggctcctgtaagtacgccctcccgctgcgcatccccccgtcagcctgcctgtccccccaggcctaccagcagggggtgacggtggacagcatcgggatgctgccccgcttcatccccgagaaccagcgcaccgtcgccgtatacagcttgaagatcgccgggtggcacgggcccaaggccccatacacgagcaccctgctgcccccggagctgtccgagacccccaacgccacgcagccagaactcgccccggaagaccccgaggattcggccctcttggaggaccccgtggggacggtggcgccgcaaatcccaccaaactggcacataccgtcgatccaggacgccgcgacgccttaccatcccccggccaccccgaacaacatgggcctgatcgccggcgcggtgggcggcagtctcctggcagccctggtcatttgcggaattgtgtactggatgcgccgccgcactcaaaaagccccaaagcgcatacgcctcccccacatccgggaagacgaccagccgtcctcgcaccagcccttgttttactagatacccccccttaatgggtgcgggggggtcaggtctgcggggttgggatgggaccttaactccatataaagcgagtctggaaggggggaaaggcggacagtcgataagtcggtagcgggggacgcgcacctgttccgcctgtcgcacccacagctttttttgcgaaccgtcccgttccgggatgccgtgccgcccgttgcagggcctggtgctcgtgggcctctgggtctgtgccaccagcctggttgtccgtggccccacggtcagtctggtatcaaactcatttgtggacgccggggccttggggcccgacggcgtagtggaggaagacctgcttattctcggggagcttcgctttgtgggggaccaggtcccccacaccacctactacgatggggtcgtagagctgtggcactaccccatgggacacaaatgcccacgggtcgtgcatgtcgtcacggtgaccgcgtgcccacgtcgccccgccgtggctttcgccctgtgtcgcgcgaccgacagcactcacagccccgcatatcccaccctggagctgaatctggcccaacagccgcttttgcgggtccggagggcgacgcgtgactatgccggggtgtacgtgttacgcgtatgggtcggggacgcaccaaacgccagcctgtttgtcctggggatggccatagccgccgaagggactctggcgtacaacggctcggcccatggctcctgcgacccgaaactgcttccgtattcggccccgcgtctggccccggcgagcgtataccaacccgcccctaacccggcctccaccccctcgaccaccacctccaccccctcgaccaccacctccaccccctcgaccaccatccccgctccccaagcatcgaccacacccttccccacgggagacccaaaaccccaacctcacggggtcaaccacgaacccccatcgaatgccacgcgagcgacccgcgactcgcgatacgcgctaacggtgacccagataatccagatagccatccccgcgtccattatagccctggtgtttctggggagctgtatttgctttatacacagatgtcaacgccgctaccgacgctcccgccgcccgatttacaacccccagatacccactggcatctcatgcgcggtgaacgaagcggccatggcccgcctcggagccgagctcaaatcgcatccgagcaccccccccaaatcccggcgccggtcgtcacgcacaccaatgccctccctgacggccatcgccgaagagtcggagcccgcgggggcggctgggcttccgacgccccccgtggaccccacgacatccaccccaacgcctcccctgttggtataggtccacggccactggccgggggcaccacataaccgaccgcagtcactgagttgggaataaaccggtattatttacctatatacgtgtatgtccatttcttcccccccccccccggaaaccaaagaaggaaacaaagaatggatgggaggagttcaggaagccggggagagggcccgcggcgcatttaaggcgttgttgtgttgactttggctcttctggcgggttggtgcggtgctgtttgttgggctcccattttacccgaagatcggctgctatccccgggacatggatcgcggggcggtggtggggtttcttctcggtgtttgtgttgtatcgtgcttggcgggaacgcccaaaacgtcctggagacgggtgagtgtcggcgaggacgtttcgttgcttccagctccggggcctacggggcgcggcccgacccagaaactactatgggccgtggaacccctggatgggtgcggccccttacacccgtcgtgggtctcgctgatgccccccaagcaggtgcccgagacggtcgtggatgcggcgtgcatgcgcgctccggtcccgctggcgatggcgtacgcccccccggccccatctgcgaccgggggtctacggacggacttcgtgtggcaggagcgcgcggccgtggttaaccggagtctggttatttacggggtccgagagacggacagcggcctgtataccctgtctgtgggcgacataaaggacccggctcgccaagtggcctcggtggtcctggtggtgcaaccggccccagttccgaccccacccccgaccccagccgattacgacgaggatgacaatgacgagggcgagggcgaggacgaaagtctagccggcactcccgccagcgggaccccccggctcccgcctccccccgcccccccgaggtcttggcccagcgcccccgaagtctcacacgtgcgtggggtgaccgtgcgtatggagactccggaagctatcctgttttcccccggggaggcgtttagcacgaacgtctccatccatgccatcgcccacgacgaccagacctacaccatggacgtcgtctggttgaggttcgacgtgccgacctcgtgtgccgagatgcgaatatacgaatcgtgtctgtatcacccgcagctcccagagtgtctgtccccggccgacgctccgtgcgccgcgagtacgtggacgtctcgcctggccgtccgcagctacgcggggtgttccagaacaaaccccccgccgcgctgttcggccgaggctcacatggagcccttcccggggctggcgtggcaggcggcctccgtcaatctggagttccgggacgcgtccccacaacactccggcctgtatctgtgcgtggtgtacgtcaacgaccatattcacgcatggggccacattaccatcagcaccgcggcgcagtaccggaacgcggtggtggaacagcccctcccacagcgcggcgcggatttggccgagcccacccacccgcacgtcggggcccctccccacgcgcccccaacccacggcgccctgcggttaggggcggtgatgggggccgccctgctgctgtctgcgctggggttgtcggtgtgggcgtgtatgacctgttggcgcaggcgtgcctggcgggcggttaaaagcagggcctcgggtaaggggcccacgtacattcgcgtggccgacagcgagctgtacgcggactggagctcggacagcgagggagaacgcgaccaggtcccgtggctggcccccccggagagacccgactctccctccaccaatggatccggctttgagatcttatcaccaacggctccgtctgtatacccccgtagcgatgggcatcaatctcgccgccagctcacaacctttggatccggaaggcccgatcgccgttactcccaggcctccgattcgtccgtcttctggtaaggcgccccatcccgaggccccacgtcggtcgccgaactgggcgaccgccggcgaggtggacgtcggagacgagctaatcgcgatttccgacgaacgcggacccccccgacatgaccgcccgcccctcgccacgtcgaccgcgccctcgccacacccgcgacccccgggctacacggccgttgtctccccgatggccctccaggctgtcgacgccccctccctgtttgtcgcctggctggccgctcggtggctccggggggcttccggcctgggggccgtcctgtgtgggattgcgtggtatgtgacgtcaattgcccgaggcgcataaagggccggtggtccgcctagccgcagcaaattaaaaatcgtgagtcactgcgaccgcaacttcccacccggagctttcttccggcctcgatgacgtcccggctctccgatcccaactcctcagcgcgatccgacatgtccgtgccgctttatcccacggcctcgccagtttcggtcgaagcctactactcggaaagcgaagacgaggcggccaacgacttcctcgtacgcatgggccgccaacagtcggtattaaggcgtcgacgcagacgcacccgctgcgtcggcatggtgatcgcctgtctcctcgtggccgttctgtcgggcggatttggggcgctcctgatgtggctgctccgctaaaagaccgcatcgacacgcgcgtccttcttgtcgtctctcttcccccccatcaccccgcaatttgcacccagcctttaactacattaaattgggttcgattggcaatgttgtctcccggttgatttttgggtgggtggggagtgggtgggtggggagtgggtgggtggggagtgggtgggtggggagtgggtgggtggggagtgggtgggtggggagtgggtgggtggggagtgggtgggtggggagtgggtgggtggggagtgggtgggtggggagtggcaaggaagaaacaagcccgaccaccagacagaaaatgtaaccatacccaaaccgactctgggggctgtttgtggggtcggaaccataggatgaacaaaccaccccgtacctcccgcacccttgggtgcgggtggctcatcggcatctgtccggtatgggttgttccccacccacttgcgttcggacgtcttagaatcatggcggttttctatgccgacatcggttttctcccccgcaataagacacgatgcgataaaatctgtttgtgaaatttattaagggtacaaattgccctagcacaggggtggggttagggccgggtccccacacccaaacgcaccaaacagatgcaggcagtgggtcgagtacagccccgcgtacgaacacgtcgatgcgtgtgtcagacagcaccagaaagcacaggccatcaacaggtcgtgcatatgtcggtgggtttggacgcggggggccatggtggtgataaagttaatggccgccgtccgccagggccacaggggcgacgtctcttggttggcccggagccactgggtgtggaccagccgcgcgtggcggcccaacatggcccctgtagccgggggcgggggatcgcgcacgtttgcagcgcacatgcgagacacctcgaccacggttcggaagaaggcccggtggtccgcgggcaacatcaccaggtgcgcaagcgcccgggcgtccagagggtagagccctgagtcatccgaggttggctcatcgcccgggtcatgccgcaagtgcgtgtgggttgggcttccggtgggcgggacgcgaaccgcggtgtggagccctacgcgggcccgagcgtacgctccatcttgtggggagaaggggtctgggctcgccaggggggcatacttgcccgggctatacagacccgcgagccgtacgtggttcgcggggggtgcgtggggtccggggctcccggggaggccggggctcccggggttgtcgtggatccctggggtcacgcggtaccctggggtctctgggagctcgcggtactctgggttccctaggttctcggggtggtcgcggaacccggggctcccggggaacacgcggtgtcctggggattgttggcggtcggacggcttcagatggcttcgagatcgtagtgtccgcaccgactcgtagtagacccgaatctccacattgccccgccgcttgatcattatcaccccgttgcgggggtccggagatcatgcgcgggtgtcctcgaggtgcgtgaacacctctggggtgcatgccggcggacggcacgccttttaagtaaacatctgggtcgcccggcccaactggggccgggggttgggtctggctcatctcgagagccacggggggaaccaccctccgcccagaaacttgggcgatggtcgtacccgggactcaacgggttaccggattacggggactgtcggtcacggtcccgccggttcttcgatgtgccacacccaaggatgcgttgggggcgattttgggcagcagcccgggagagcgcagcagaggacgctccgggtcgtgcacggcggttttggccgcctcccggtcctcacgcccccttttattgatctcatcgcgtacgtcggcgtacgtcctgggcccaacccgcatgttgtccaggaaggtgtccgccatttccagggcccacgacatgctcccccgcccgacgagcaggaagcggtccacgcaacggtcgccgccggtcgccccgacgagcaggaagcggtccacgcaacggtcgccgccggtcgcctcgacgaggacgttcctcctgcgggaaggcacgaacgcgggtgagccccctcctccgcccccgcgtcccccctcctccgcccccgcgtcccccctcctccgcccccgcgtcccccctcctccgcccccgcgtcccccctcctccgcccccgcgtcccccctcctccgcccccgcgtcccccctcctccacccccgcgtccccccctcctccgcccacccaaggtgcttacccgtgcacaaaggcggaccggtgggtttctgtcgtcggaggcccccggggtgcgtcccctgtgtttcgtgggtggggtgggtgggtctttccgcgtgtccctttccgatgcgatcccgatcccgagccggggcgtcgcgatgccgacgccgtccgctccgacggccctctgcgagtcccgctcccggtccgcgtgctccgcagccgctcccgtcgttcgtggccggcgccgtctgcgggcgtcggtcgcgccgggcctttatgtgcgccggagagacccgccccccgccgcccgggcccgcccccggggccggcgcggagtcgggcacggcgccagtgctcgcacttcgccctaataatatatatatattgggacgaagtgcgaacgcttcgcgttctcacttcttttacccggcggccccgcccccttggggcggtcccgcccgccggccaatgggggggcggcaaggcgggcggcccttgggccgcccgccgtcccgttggtcccaacgtccggcgggcgggaccgggggcccggggacggccaacgggcgcgcggggctcgtatctcattaccgccgaaccgggaagtcggggcccgggccccgcccccggcccgttcctcgttagcatgcggaacggaagcggaaaccaccggatcgggcggtaatgagatgccatgcggggcggggcgcgggcccacccgccctcgcgccccgcccatggcagatggcgcggatgggcggggccgggggttcgaccaacgggccgcggccacgggcccccggcgtgccggcgtcggggcggggtcgtgcataatggaattccgttcggggcgggcccgcctggggggcggggggccggcggcctccgctgctcctccttcccgccggcccctgggactatatgagcccgaggacgccccgatcgtccacacggagcgcggctgccgacacggatccacgacccgacgcgggaccgccagagacagaccgtcagacgctcgccgcgccgggacgccgatacgcggacgaagcgcgggagggggatcggccgtccctgtcctttttcccacccaagcatcgaccggtccgcgctagttccgcgtcgacggcgggggtcgtcggggtccgtgggtctcgccccctccccatcgagagtccgtaggtgacctaccgtgctacgtccgccgtcgcagccgtatccccggaggatcgccccgcatcggcgatggcgtcggagaacaagcagcgccccggctccccgggccccaccgacgggccgccgcccaccccgagcccagaccgcgacgagcggggggccctcgggtggggcgcggagacggaggagggcggggacgaccccgaccacgaccccgaccacccccacgacctcgacgacgcccggcgggacgggagggcccccgcggcgggcaccgacgccggcgaggacgccggggacgccgtctcgccgcgacagctggccctgctggcctccatggtagaggaggccgtccggacgatcccgacgcccgaccccgcggcctcgccgccccggacccccgcctttcgagccgacgacgatgacggggacgagtacgacgacgcagccgacgccgccggcgaccgggccccggcccggggccgcgcacgggaggccccgctacgcggcgcgtatccggaccccacggaccgcctgtcgccgcgcccgccggcccagccgccgcggagacgtcgtcacggccggcggcggccatcggcgtcatcgacctcgtcggactccgggtcctcgtcctcgtcgtccgcatcctcttcgtcctcgtcgtccgacgaggacgaggacgacgacggcaacgacgcggccgaccgcgcacgcgaggcgcgggccgtcgggcggggtccgtcgagcgcggcgccggaagcccccgggcggacgccgcccccgcccgggccaccccccctctccgaggccgcgcccaagccccgggcggcggcgaggacccccgcggcctccgcgggccgcatcgagcgccgccgggcccgcgcggcggtggccggccgcgacgccacgggccgcttcacggccgggcagccccggcgggtcgagctggacgccgacgcggcctccggcgccttctacgcgcgctatcgcgacgggtacgtcagcggggagccgtggcccggcgccgggcccccgcccccggggcgggtgctgtacggcggcctgggcgacagccgcccgggcctctggggggcgcccgaggcggaggaggcgcgacgccggttcgaggcctcgggcgccccggcggccgtgtgggcgcccgagctgggcgacgccgcgcagcagtacgccctgatcacgcggctgctgtacaccccggacgcggaggccatggggtggctccagaacccgcgcgtggtccccggggacgtggcgctggaccaggcctgcttccggatctcgggcgccgcgcgcaacagcagctccttcatcaccggcagcgtggcgcgggccgtgccccacctgggctacgccatggcggccggccgcttcggctggggcctggcgcacgcggcggccgccgtggccatgagccgccgatacgaccgcgcgcagaagggcttcctgctgaccagcctgcgccgcgcctacgcgcccctgttggcgcgcgagaacgcggcgctgacgggggccgcggggagccccggcgccggcgcagatgacgagggggtcgccgccgccgtcgtcgccgccgccgccgcaccgggcgagcgcgcggtgcccgccgggtacggcgccgcggggatcctcgccgccctggggcggctgtccgccgcgcccgcctcccccgcggggggcgacgaccccgacgccgcccgccacgccgacgccgacgacgacgccgggcgccgcgcccaggccggccgcgtggccgtggagtgcctggccgcctgccgcgggatcctggaggcgctggccgagggcttcgacggcgacctggcggccgtcccggggctggccggggcccggcccgccagccccccgcggccggagggacccgcgggccccgcttccccgccgccgccgcacgccgacgcgccccgcctgcgcgcgtggctgcgcgagctgcggttcgtgcgcgacgcgctggtgctcatgcgcctgcgcggggacctgcgcgtggccggcggcagcgaggccgccgtggccgccgtgcgcgccgtgagcctggtcgccggggccctgggccccgcgctgccgcgggacccgcgcctgccgagctccgcggccgccgccgccgcggacctgctgtttgagaaccagagcctgcgccccctgctggcggcggccgccagcgcaccggacgccgccgacgcgctggcggccgccgccgcctccgccgcgccgcgggaggggcgcaagcgcaagagtcccggcccggcccggccgcccggaggcggcggcccgcgacccccgaagacgaagaagagcggcgcggacgcccccggctcggacgcccgcgcccccctccccgcgcccccctccacgcccccggggcccgagcccgcccccgcccagcccgcggcgccccgggccgccgcggcgcaggcccgcccgcgccccgtggcgctgtcgcgccggcccgccgagggccccgaccccctgggcggctggcggcggcagcccccggggcccagccacacggcggcgcccgcggccgccgccctggaggcctactgctccccgcgcgccgtggccgagctcacggaccacccgctgttccccgtcccctggcgaccggccctcatgtttgacccgcgggccctggcctcgatcgccgcgcggtgcgccgggcccgccgccgccgcccaggccgcgtgcggcggcggcgacgacgacgataacccccacccccacggggccgccgggggccgcctctttggccccctgcgcgcctcgggcccgctgcgccgcatggcggcctggatgcgccagatccccgaccccgaggacgtgcgcgtggtggtgctgtactcgccgctgccgggcgaggacctggccggcggcggggcctcgggggggccgccggagtggtccgccgagcgcggcgggctgtcctgcctgctggcggccctggccaaccggctgtgcgggccggacacggccgcctgggcgggcaactggaccggcgcccccgacgtgtcggcgctgggcgcgcagggcgtgctgctgctgtccacgcgggacctggccttcgccggggccgtggagtttctggggctgctcgccagcgccggcgaccggcggctcatcgtggtcaacaccgtgcgcgcctgcgactggcccgccgacgggcccgcggtgtcgcggcagcacgcctacctggcgtgcgacctgctgcccgccgtgcagtgcgccgtgcgctggccggcggcgcgggacctgcgccgcacggtgctggccccgggccgcgtgttcggcccgggggtcttcgcgcgcgtggaggccgcgcacgcgcgcctgtaccccgacgcgccgccgctgcgcctgtgccgcggcggcaacgtgcgctaccgcgtgcgcacgcgcttcggcccggacacgccggtgcccatgtccccgcgcgagtaccgccgggccgtgctgccggcgctggacggccgggcggcggcctcggggaccaccgacgccatggcgcccggcgcgccggacttctgcgaggaggaggcccactcgcaccgcgcctgcgcgcgctggggcctgggcgcgccgctgcggcccgtgtacgtggcgctggggcgcgaggcggtgcgcgccggcccggcccggtggcgcgggccgcggagggacttttgcgcccgcgccctgctggagcccgacgacgacgcccccccgctggtgctgcgcggcggcgacgacgacgacgacggcccgggggccctgccgccggcgttgcccgggattcgctgggcctcggccacgggccgcagcggcaccgtgctggcggcggcgggggccgtggaggtgctgggggcggaggcgggcttggccacgcccccgcgacgggaagttgtggactgggaaggcgcctgggacgacgacgacggcggcgcgttcgagggggacggggtgctgtaacgggccgggacggggcggggcgcttgcgaaacccgaagacgcaataaacgacaacgacctgatttagttttgcagtagcgttgtttatttcgaggggcgggagggggcgaggggcgggagggggcgaggggcgggagggggcgaggggcgggagggggcgaggggcgggagggggcgaggggcgggagggggcgaggggcgggagggggcgaggggcgggagggggcgaggggcgggagggggcgaggggcgggagggggcgaggggcgggagggggcgaggggcgggagggggcgaggggcgggagggggcgaggggcgggagggggcgaggggcgggagggggcgaggggcgggagggggcgaggggcgggagggggcgaggggcgggagggggcgaggggcgggagggggcgaggggcggtggtggtgcgcgggcgcccccggagggtttggatctctgacctgagattggcggcactgaggtagagatgcccgaacccccccgagggagcgcgggacgcggccggggagggctggggccggggagggctggggccggggagggctggggccggggagggctggggccggggagggctggggccggggagggctggggccggggagggctggggctggggagggctggggctggggagggctggggcggtggtgtgtgacaggagcggcgtgttgcgctgggggacgtctggaggagcggggggtgcgcggtgacgtgtggatgaggaacaggagttgttgcgcggtgagttgtcgctgtgagttgtgttggtgggcaggtgtggtggatgacgtgacgtgtgacgtgtggatgaggaaccggagtcgccggtgcgccgtgctgttggtgttctgttggtgttgttacacctgtggcagcccgggccccccgcgggcggggcggcgcgcaaaaaaggcgggcggcggtccgggcggcgtgcgcgcgcgcggcgggcgttgggggagcggggggaggagcggggggaggagcggggggaggagcggggggaggagcggggggaggagcggggggaggagcggggggaggagcggggggaggagcggggggaggagcggggggaggagcggggggaggagcggggggaggagcggggggaggagcggggggaggagcggggggaggagcggggggaggagcggggggaggagcggggggaggagcggaaaacgggccccccccgaaacacaccccccgggggtcgcgcgcggccctttaaagcg

SEQ ID NO: 2 - DNA, 612 bp, Artificial Sequence
  Synthetic sequence derived from HSV-1(F)
atgaccatggaggagggagaactgccgctggaggaacagttttcattgtcctcgtacggcacctctgatttttttgtcagttcggcatactcgcgtcttccgccccatacccagccggtcttttcaaagcgcgtgattctgttcctttggtcgtttttggtcctgaagccgttggagatggtggcagcgggcatgtattacgggctgaccggaagggtggtggcgccggcctgtatcctggccgccatcgtcggctactacgttacgtgggcggtgcgggcgctcctcctgtacgttaacatcaagagggatcgtctgccgttgtcggcgcccgtgttttgggggatgtccgtgtttttgggaggcacggccctgtgtgccttgttcgccgccgcccacgagaccttcagtccggacgggcttttccactttatcgccaccaaccaaatgctgccacccaccgatcccctgcgcacacgggccctggggatagcctgtgcggccggggcctcgatgtgggtggcggcggcggacagctttgccgcctctgccaatttcttcctggcacgcttttggaccagggccatcttgaatgcacccgtcgcgttctaa

SEQ ID NO: 3 - protein, 203 aa, Artificial Sequence
  Synthetic sequence derived from HSV-1(F)
MTMEEGELPLEEQFSLSSYGTSDFFVSSAYSRLPPHTQPVFSKRVILFLWSFLVLKPLEMVAAGMYYGLTGRVVAPACILAAIVGYYVTWAVRALLLYVNIKRDRLPLSAPVFWGMSVFLGGTALCALFAAAHETFSPDGLFHFIATNQMLPPTDPLRTRALGIACAAGASMWVAAADSFAASANFFLARFWTRAILNAPVAF

SEQ ID NO: 4 - DNA, 903 bp, Artificial Sequence
  Synthetic sequence derived from HSV-1(F)
atgctcgccgtccgttccctgcagcacctctcaaccgtcgtcttgataacggcgtacggcctcgtgctcgtgtggtacaccgtcttcggtcacccccccaacgggggctggcgcaaccacgcccatatctgctacgccaatcttatcgcgggtagggtcgtgcccttccaggtcccacccgacgccatgaatcgtcggatcatgaacgtccacgaggcagttaactgtctggagaccctatggtacacacgggtgcgtctggtggtcgtagggtggttcctgtatctggcgttcgtcgccctccaccaacgccgatgtatgtttggtgtcgtgagtcccgcccacaagatggtggccccggccacctacctcttgaactacgcaggccgcatcgtatcgagcgtgttcctgcagtacccctacacgaaaattacccgcctgctctgcgagctgtcggtccagcggcaaaacctggttcagttgtttgagacggacccggtcaccttcttgtaccaccgccccgccatcggggtcatcgtaggctgcgagttgatgctacgctttgtggccgtgggtctcatcgtcggcaccgctttcatatcccggggggcatgtgcaatcacataccccctgtttctgaccatcaccacctggtgttttgtctccaccatcggcctgacagagctgtattgtattctgcggcggggcccggcccccaagaacgcagacaaggccgccgccccggggcgatccaaggggctgtcgggcgtctgcgggcgctgctgttccatcatcctctcgggcatcgcagtgcgattgtgttatatcgccgtggtggccggggtggtgctcgtggcgcttcactacgagcaggagatccagaggcgcctgtttgatgtatga

SEQ ID NO: 5 - protein, 300 aa, Artificial sequence
  synthetic sequence
MLAVRSLQHLSTVVLITAYGLVLVWYTVFGHPPNGGWRNHAHICYANLIAGRVVPFQVPPDAMNRRIMNVHEAVNCLETLWYTRVRLVVVGWFLYLAFVALHQRRCMFGVVSPAHKMVAPATYLLNYAGRIVSSVFLQYPYTKITRLLCELSVQRQNLVQLFETDPVTFLYHRPAIGVIVGCELMLRFVAVGLIVGTAFISRGACAITYPLFLTITTWCFVSTIGLTELYCILRRGPAPKNADKAAAPGRSKGLSGVCGRCCSIILSGIAVRLCYIAVVAGVVLVALHYEQEIQRRLFDV

SEQ ID NO: 6 - DNA, 150432 bp, Artificial sequence
  synthetic sequence
agcccgggccccccgcgggcggggcggcgcgcaaaaaaggcgggcggcggtccgggcggcgtgcgcgcgcgcggcgggcgttggggagcggggggaggagcggggggaggagcggggggaggagcggggggaggagcggggggaggagcggggggaggagcggggggaggagcggggggaggagcggggggaggagcggggggaggagcggggggaggagcggggggaggagcggggggaggagcggggggaggagcggggggaggagcggggggaggagcggggggaggagcggggggaggagcggaaaacgggccccccccgaaacacaccccccgggggtcgcgcgcggccctttaaagcgcggcggcgcagcccgggccccccgcggccgagacgagcgagttagacaggcaagcactactcgcctctgcacgcacatgcttgcctgtcaaactctaccaccccggcacgctctctgtctccatggcccgccgccgccgccatcgcggcccccgccgcccccggccgcccgggcccacgggcgccgtcccaaccgcacagtcccaggtaacctccacgcccaactcggaacccgcggtcaggagcgcgcccgcggccgccccgccgccgccccccgccagtgggcccccgccttcttgttcgctgctgctgcgccagtggctccacgttcccgagtccgcgtccgacgacgacgatgacgacgactggccggacagccccccgcccgagccggcgccagaggcccggcccaccgccgccgccccccgcccccggtccccaccgcccggcgcgggcccggggggcggggctaacccctcccaccccccctcacgccccttccgccttccgccgcgcctcgccctccgcctgcgcgtcaccgcagagcacctggcgcgcctgcgcctgcgacgcgcgggcggggagggggcgccggagccccccgcgacccccgcgacccccgcgacccccgcgacccccgcgacccccgcgcgggtgcgcttctcgccccacgtccgggtgcgccacctggtggtctgggcctcggccgcccgcctggcgcgccgcggctcgtgggcccgcgagcgggccgaccgggctcggttccggcgccgggtggcggaggccgaggcggtcatcgggccgtgcctggggcccgaggcccgtgcccgggccctggcccgcggagccggcccggcgaactcggtctaacgttacacccgaggcggcctgggtcttccgcggagctcccgggagctccgcaccaagccgctctccggagagacgatggcaggagccgcgcatatatacgctgggagccggcccgcccccgaggcgggcccgccctcggagggcgggactggccaatcggcggccgccagcgcggcggggcccggccaaccagcgtccgccgagtcttcggggcccggcccactgggcgggagttaccgcccagtgggccgggccgcccacttcccggtatggtaattaaaaacttacaagaggccttgttccgcttcccggtatggtaattagaaactcattaatgggcggccccggccgcccttcccgcttccggcaattcccgcggcccttaatgggcaaccccggtattccccgcctcccgcgccgcgcgtaaccactcccctggggttccgggttatgctaattgcttttttggcggaacacacggcccctcgcgcattggcccgcgggtcgctcaatgaacccgcattggtcccctggggttccgggtatggtaatgagtttcttcgggaaggcgggaagccccggggcaccgacgcaggccaagcccctgttgcgtcggtgggaggggcatgctaatggggttctttgggggacaccgggttggtcccccaaatcgggggccgggccgtgcatgctaatgatattctttgggggcgccgggttggtccccggggacggggccgccccgcggtgggcctgcctcccctgggacgcgcggccattgggggaatcgtcactgccgcccctttggggaggggaaaggcgtggggtataagttagccctggcccgacagtctggtcgcatttgcacctcggcactcggagcgagacgcagcagccaggcagactcgggccgccccctctccgcatcaccacagaagccccgcctacgttgcgacccccagggaccctccgtccgcgaccctccaaccgcatacgacccccatggagccccgccccggagcgagtacccgccggcctgagggccgcccccagcgcgaggtgaggggccgggcgccatgtctggggcgccatattggggggcgccatattggggggcgccatgttgggggacccccgacccttacactggaaccggccgccatgttgggggacccccactcatacacgggagccgggcgccatgttagggggcgtggaaccccgtgacactatatatacagggaccgggggcgccatgttagggggcgcggaaccccctgaccctatatatacagggaccggggtcgccctgttgggggtcgccatgtgaccccctgactttatatatacagaccccccaacacatacacatggcccctttgactcagacgcagggcccggggtcgccgtgggaccccctgactcatacacagagacacgcccccacaacaaacacacagggaccggggtcgccgtgttagggggcgtggtccccactgactcatacgcagggcccccttactcacacgcatctaggggggtggggaggagccgcccgccatatttgggggacgccgtgggacccccgactccggtgcgtctggagggcgggagaagagggaagaagaggggtcgggatccaaaggacggacccagaccacctttggttgcagacccctttctcccccctcttccgaggccagcaggggggcaggactttgtgaggcggggggggggagagggggaactcgtgggcgctgattgacgcgggaaatccccccattcttacccgcccccctttttttccccttagcccgccccggatgtctgggtgtttccctgcgaccgagacctgccggacagcagcgactctgaggcggagaccgaagtgggggggcggggggacgccgaccaccatgacgacgactccgcctccgaggcggacagcacggacacggaactgttcgagacggggctgctggggccgcagggcgtggatgggggggcggtctcgggggggagccccccccgcgaggaagaccccggcagttgcgggggcgccccccctcgagaggacggggggagcgacgagggcgacgtgtgcgccgtgtgcacggatgagatcgcgccccacctgcgctgcgacaccttcccgtgcatgcaccgcttctgcatcccgtgcatgaaaacctggatgcaattgcgcaacacctgcccgctgtgcaacgccaagctggtgtacctgatagtgggcgtgacgcccagcgggtcgttcagcaccatcccgatcgtgaacgacccccagacccgcatggaggccgaggaggccgtcagggcgggcacggccgtggactttatctggacgggcaatcagcggttcgccccgcggtacctgaccctgggggggcacacggtgagggccctgtcgcccacccaccctgagcccaccacggacgaggatgacgacgacctggacgacggtgaggcgggggggcggcgaggaccctgggggaggaggaggaggaggggggagggaggaataggcgggcgggggggcgaggaaagggcgggcgcggaaagggagggcctgggagggggcgtaacctgatcgcgccccccgttgtctcttgcagcagactacgtaccgcccgccccccgccggacgccccgcgcccccccacgcagaggcgccgccgcgccccccgtgacgggcggggcgtctcacgcagccccccagccggccgcggctcggacagcgcccccctcggcgcccatcgggccacacggcagcagtaacaccaacaccaccaccaacagcagcggcggcggcggcggctcccgccagtcgcgagccgcggcgccgcggggggcgtctggcccctccgggggggttggggttggggttggggttgttgaagcggaggcggggcggccgaggggccggacgggcccccttgtcaacagacccgccccccttgcaaacaacagagaccccatagtgatcagcgactcccccccggcctctccccacaggccccccgcggcgcccatgccaggctccgccccccgccccgggcccaccgcgtcctcggccgcgtcgggacccgcgcgcccccgcgcggccgtggccccgtgcgtgcgagcgccgcctccggggcccggcccccgcgccccggcccccgcggacgcgcgccgtgtgccccagtcgcactcgtccctggctcaggccgcgaaccaagaacagagtctgtgccgggcgcgtgcgacggtggcgcgcggctcgggggggccgggcgtggagggtggacacgggccctcccgcggcgccgccccctccggcgcccccccgctcccctccgccgcctctgtcgagcaggaggcggcggtgcgtccgaggaagaggcgcgggtcgggccaggaaaacccctccccccagtccacgcgtccccccctcgcgccggcaggggccaagagggcggcgacgcaccccccctccgactcagggccgggggggcgcggccagggtgggcccgggacccccctgacgtcctcggcggcctccgcctcttcctcctctgcctcttcctcctcggccccgactcccgcgggggccgcctcttccgccgccggggccgcgtcctcctccgcttccgcctcctcgggcggggccgtcggtgccctgggagggagacaagaggaaacctccctcggcccccgcgctgcttctgggccgcgggggccgaggaagtgtgcccggaagacgcgccacgcggagacttccggggccgcccccgcgggcggcctcacgcgctacctgcccatctcgggggtctctagcgtggtcgccctgtcgccttacgtgaacaagacgatcacgggggactgcctgcccatcctggacatggagacggggaacatcggggcgtacgtggtcctggtggaccagacgggaaacatggcgacccggctgcgggccgcggtccccggctggagccgccgcaccctgctccccgagaccgcgggtaaccacgtgatgccccccgagtacccgacggcccccgcgtcggagtggaacagcctctggatgacccccgtggggaacatgctgttcgaccagggcaccctagtgggcgccctggacttccgcagcctgcggtctcggcacccgtggtccggggagcagggggcgtcgacccgggacgagggaaaacaataagggacgccccccgtgtttgtggggaggggggggtcgggcgctgggtggtctctggccgcgcccactacaccagccaatccgtgtcggggaggggaaaagtgaaagacacgggcaccacacaccagcgggtctttagtgttggccctaataaaaaactcaggggatttttgctgtctattgggaaataaaggtttacttttgtatcttttccctgtctgtgttggatggatctcgggggtgcgtgggagtgggggtgcgtgggagtgggggtgcgtgggagtgggggtgcgtgggagtgggggtgcgtgggagtgggggtgcgtgggagtgggggtgcgtgggagtgggggtgcgtgggagtgggggtgcgtgggagtgggggtgccatgttgggcaggctctggtgttaaccacagagccgcggcccgggctgcctgaccaccgatccccgaaagcatcctgccactggcatggagccagaaccacagtgggttgggtgtgggtgttaagtttccgcgagcgcctgcccgcccggactgacctggcctctggccgccacaaagggcgggggggggttaactacactatagggcaacaaaggacgggaggggtggcggggcgggacggggcgcccaaaagggggtcggccacaccacagacgtgggtgttggggggtggggcggaggggtggggggggagacagaaacaggaacatagttagaaaacaagaatgcggtgcagccagagaatcacaggagacgaggggatgggcgtgttggttaccaacccacacccaggcatgctcggtggtatgaaggagggggggcggtgcttcttagagaccgccgggggacgtggggttggtgtgcagaggcacgcgcacccgcgtcggccaggtgggccggtaccccatcccccctcccccgacccttcccacccccgcgtgccagagatcaccccggtcccccggcacccgccactcctccatatcctcgctttaggaacaactttagggggggtacacacgcgccgtgcatttccttccacaccccccctcccccgcactcccccccccccggcagtaagacccaagcatagagagccaggcacaaaaacacaggcggggtgggacacatgccttcttggagtacgtgggtcattggcgtggggggttacagcgacaccggccgaccccctggcggtcttccagccggcccttagataagggggcagttggtggtcggacgggtaagtaacagagtctgactaagggtgggagggggggaaaagaacgggctggtgtgctgtaacacgagcccacccgcgagtggcgtggccgaccttagcctctggggcgccccctgtcgtttgggtcccccccctctattggggagaagcaggtgtctaacctacctggaaacgcggcgtctttgttgaaccacaccggggcgcccttgacgagtgggataacgggggaggaagggagggaggagggtactgggggtgaagaaggggggggggggagaagcgagaacaggaaaggcgacggagcccgacaaaacaccgagaaaaaaaaaccacagcgcatgcgccgggccgttgtggggccccgggccggggccccttgggtccgccggggccccgggccgggccgccacgggggccggccgttggcggtaaccccgattgtttatctcaggccccgggccgggaacccggaaaagcctccggggggcctttttcgcgtcgcgtgccggcgagcgggcccggacggggcccggaccgccgcggtcgggggccccctcgtcccgggccgtacgcggccttcgccccgtgaggggacagacgaacgaaacattccggcgacggaacgaaaaacaccccagacgggttaaagaaacagaaaccgcaaccccccccacccccgaaacggggaaaacaaaaaacagaccagcggccggccggcgcttagggggaggatgtcgccgacgccccttggccgccccggctgcaggggggcccggagagccgcggcacccggacgcgcccggaaagtctttcgcaccacccgcgatcggcacggccgcgcccccgcttttataaaggctcagatgacgcagcaaaaacaggccacagcaccacgtgggtaggtgatgtaattttattttcctcgtctgcggcctaatggatttccgggcgcggtgcccctgtctgcagagcacttaacggattgatatctcgcgggcacgcgcgcccttaatggaccggcgcggggcggggggccggatacccacacgggcgggggggggggtgtcgcgggccgtctgctggcccgcggccacataaacaatgactctgggcctttctgcctctgccgcttgtgtgtgcgcgcgccggctctgcggtgtcggcggcggctgcggcggctgcggcggccgccgtgttcggtctcggtagccggccggcgggtggactcgcggggggccggagggtggaaggcaggggggtgtaggatgggtatcaggacttccacttcccgtccttccatcccccgttcccctcggttgttcctcgcccccccccacaccccgccgctttccgttggggttgttattgttgtcgggatcgtgcgggccgggggtcgccggggcaggggcgggggcgggggtgctcgtcgatcgaccgggctcagtgggggcgtggggtgggggggaaaaggcgaagagactgggggtgggggggggtgtcgggggtggctgtttttttttgtgggtgttttttgtggctgttcccgtcccccgtcacccccctccctccgtccccccgtcgcgggtgtttgtgtttgtttattccgacatcggtttatttaaataaacacagccgttctgcgtgtctgttcttgcgtgtggctgggggcttatatgtggggtcccgggggcgggatggggtttagcggcggggggcggcgcgccggacggggcgctggagataacggcccccggggaacgggggaccggggctgggtctcccgaggtgggtgggtgggcggcggtggccgggccgggccgggccgggtgggcggggtttggaaaaacgaggaggaggaggaggagaaggagggggggggagacggggggaaagcaaggacacggcccggggggtgggagcgcgggccgggccgctcgtaagagccgcgacccggccgccggggagcgttgtcgccgtcggtctgccggcccccgtccctcccttttttgaccaaccagcgcccccccccctcaccaccattcctaccaccaccaccaccaccgacacctcccgcacacccccgcccacactccccccccccacccaacccgcaccacgagcacgggttgggggtagcaggggatcaaaggggggcaaggccggcggggcggttcgggggcgggggcgggagaccgagtaggccccgcccatccgcggcccctcccggcagccacgccccccagcgtcgggtgtcacggggaaagagcagggggagaggggagagggggggagaggggagagggggggagaggggagagggggggagaggggagagggggggagaggggagagggggggagaggggagagggggggagaggggagagggggggagaggggagagggggggagaggggagagggggggagaggggagagggggggagagggggtatataaaccaacgaaaagcgcgggaacggggatacggggcttgtgtggcacgacgtcgtggttgtgttactgggcaaacacttggggactgtaggtttctgtgggtgccgaccctaggcgctatggggattttgggttgggtcgggcttattgccgttggggttttgtgtgtgcgggggggcttgtcttcaaccgaatatgttattcggagtcgggtggctcgagaggtgggggatatattaaaggtgccttgtgtgccgctcccgtctgacgatcttgattggcgttacgagaccccctcggctataaactatgctttgatagacggtatatttttgcgttatcactgtcccggattggacacggtcttgtgggataggcatgcccagaaggcatattgggttaacccctttttatttgtggcgggttttttggaggacttgagtcaccccgcgtttcctgccaacacccaggaaacagaaacgcgcttggccctttataaagagatacgccaggcgctggacagtcgcaagcaggccgccagccacacacctgtgaaggctgggtgtgtgaactttgactattcgcgcacccgccgctgtgtagggcgacaggatttgggacctaccaacggaacgtctggacggaccccggttctgccgccggacgatgaagcgggcctgcagccgaagcccctcaccacgccgccgcccatcatcgccacgttggaccccaccccgcgacgggacgccgccgcaaaaagcagacgccgacgaccccactcccggcgcatctaatgatgccgcgacggaaacccgtccgggttcggggggcgaaccggccgcctgtcgctcgtcagggccggcgggcgctcctcgccgccctagaggctgtcccgctggtgtgacgttttcctcgtccgcgccccccgaccctcccatggatttaacaaacgggggggtgtcgcctgtggcgacctcggcgcctctggactggaccacgtttcggcgtgtgtttctgatcgacgacgcgtggcggcccctgttggagcctgagctggcgaaccccttaaccgcccacctcctgaccgaatataatcgtcggtgccagaccgaagaggtgctgccgccgcgggaggatgtgttttcgtggactcgttattgcacccccgacgaggtgcgcgtggttatcatcggccaggacccatatcaccaccccggccaggcgcacggacttgcgtttagcgtgcgcgcgaacgtgccgcctcccccgagtcttcggaatgtcttggcggccgtcaagaactgttatcccgaggcacggatgagcggccacggttgcctggaaaagtgggcgcgggacggcgtcctgttactaaacacgaccctgaccgtcaagcgcggggcggcggcgtcccactctagaatcggttgggaccgcttcgtgggcggagttatccgccggttggccgcgcgccgccccggcctggtgtttatgctctggggcgcacatgcccagaatgccatcaggccggaccctcgggtccattgcgtcctcaagttttcgcacccgtcgcccctctccaaggttccgttcggaacatgccagcatttcctcgtggcgaatcgatatctcgagacccggtcgatttcacccatcgactggtcggtttgaaaggcatcgacgtccggggttttcgtctgtgggggcttttgggtatttccgatgaataaagacggttaatggttaaacctctggtctcatacgggtcggtgatgtcgggcgtcgggggagagggagttccctctgcgcttgcgattctagcctcgtggggctggacgttcgacacgccaaaccacgagtcagggatatcgccagatacgactcccgcagattccattcggggggccgctgtggcctcacctgaccaacctttacacgggggcccggaacgggaggccacagcgccgtctttctccccaacgcgcgcggatgacggcccgccctgtaccgacgggccctacgtgacgtttgataccctgtttatggtgtcgtcgatcgacgaattagggcgtcgccagctcacggacaccatccgcaaggacctgcggttgtcgctggccaagtttagcattgcgtgcaccaagacctcctcgttttcgggaaacgccccgcgccaccacagacgcggggcgttccagcgcggcacgcgggcgccgcgcagcaacaaaagccttcagatgtttgtgttgtgcaaacgcacccacgccgctcgagtgcgagagcagcttcgggtcgttattcagtcccgcaagccgcgcaagtattacacgcgatcttcggacgggcggctctgccccgccgtccccgtgttcgtccacgagttcgtctcgtccgagccaatgcgcctccaccgagataacgtcatgctggcctcgggggccgagtaaccgcccccccgcgccaccctcactgcccgtcgcgcgtgtttgatgttaataaataacgcataaatttggctggttgtttgttgtctttaatggaccgcccgcagggggggtggcatttcagtgtcgggtgacgagcgcgatccggccgggatcctaggaccccaaaagtttgtctgcgtattccagggcggggctcagttgaatctcccgcagcacctctaccagcaggtccgcggtgggctggagaaactcggccgtcccggggcaggcggtcgtcgggggtggaggcgcggcgcccaccccgtgtgccgcgcctggcgtctcctctgggggcgacccgtaaatggttgcagtgatgtaaatggtgtccgcggtccagaccacggtcaaaatgccggccgtggcgctccgggcgctttcgccgcgcgaggagctgacccaggagtcgaacggatacgcgtacatatgggcgtcccacccgcgttcgagcttctggttgctgtcccggcctataaagcggtaggcacaaaattcggcgcgacagtcgataatcaccaacagcccaatgggggtgtgttggataacaacgcctccgcgcggcaggcggtcctggcgctcccggccccgtaccatgatcgcgcgggtgccgtactcaaaaacatgcaccacctgcgcggcgtcgggcagtgcgctggtcagcgaggccctggcgtggcataggctatacgcgatggtcgtctgtggattggacatctcgcggtgggtagtgagtcccccgggccgggttcggtggaactgtaaggggacggcgggttaatatacaatgaccacgttcggatcgcgcagagccgatagtatgtgcttactaatgacgtcatcgcgctcgtggcgctcccggagcggatttaagttcatgcgaaggaattcggaggaggtggtgcgggacatggccacgtacgcgctgttgaggcgcaggttgccgggcgtaaagcagatggcgaccttgtccaggctaaggccctgggagcgcgtgatggtcatggcaagcttggagctgatgccgtagtcggcgtttatggccatggccagctccgtagagtcaatggactcgacaaactcgctgatgttggtgttgacgacggacatgaagccgtgttggtcccgcaagaccacgtaaggcaggggggcctcttccagtaactcggccacgttggccgtcgcgtgccgcctccgcagctcgtccgcaaaggcaaacacccgtgcgtacgtgtatcccatgagcgtataattgtccgtctgcagggcgacggacatcagccccccgcgcggcgagccggtcagcatctcgcagccccggaagataacgttgtccacgtacgtgctaaagggggcgccttcaaatgcctccccaaagagctcttggaggattcggaatctcccgaggaaggcccgcttcagcagcgcaaactgggtgtgaacggcggcggtggtctccggttccccgggggtgtagtggcagtaaaacacgtcgagctgttgttcgtccagccccgcgaaaataacgtcgaggtcgtcgtcgggaaaatcgtccgggcccccgtcccgcggccccagttgcttaaaatcaaacgcacgctcgccgggggcgcctgcgtcggccattaccgacgcctgcgtcggcacccccgaagatttggggcgcagagacagaatctccgccgttagttctcccatgcgggcgtaggcgagggtcctctgggtcgcatccaggcccgggcgctgcagaaagttgtaaaaggagataagcccgctaaatatgagccgcgacaggaacctgtaggcaaactccaccgaagtctccccctgagtctttacaaagctgtcgtcacgcaacactgcctcgaaggcccggaacgtcccactaaacccaaaaaccagttttcgcaggcgcgcggttaccgcgatctggctgttgaggacgtaagtgacgtcgttgcgggccacgaccagctgctgtttgctgtgcacctcgcagcgcatgtgccccgcgtcctggtcctggctctgcgagtagttggtgatgcggctggcgttggccgtgagccacttttcaatagtcaggccgggctggtgtgtcagccgtcggtattcgtcaaactccttgaccgacacgaacgtaagcacggggagggtgaacacgacaaactccccctcacgggtcaccttcaggtaggcgtggagcttggccatgtacgcgctcacctctttgtgggaggagaacaaccgcgtccagccggggaggttggcggggttggtgatgtagttttccgggacgacgaagcgatccacgaactgcatgtgctcctcggtgatgggtaggccgtactccagcaccttcatgaggttaccgaactcgtgctcgatgcaccgtttgttgttaataaaaatggcccagctatacgagaggcgggcgtactcccgcagcgtgcggttgcagatgaggtacgtgagcacgttctcgctctggcggacggaacaccgcagtttctggtgctcgaaggtcgactccagggacgccgtctgtgtcggcgagcccacacacaccaacacgggccgcaggcgggccgcgtactggggggtgtggtacagggcgttaatcatccaccagcaatacaccacggccgtgaggaggtgacgcccaaggagcccggcctcgtcgatgacgatcacgttgctgcgggtaaaggccggcagcgccccgtgggtggccggggccaaccgcgtcagggcgccctcggccaaccccagggtccgttccagggcggccagggcgcgaaactcgttccgcgactcctcgcccccggaggcggccagggtgcgcttcgtgaggtccaaaatcacctcccagtagtacgtcagatctcgtcgctgcaggtcctccagcgaggcggggttgctggtcagggtgtacgggtactgccccagttgggcctggacgtgattcccgcgaaacccaaattcatgaaagatggtgttgatgggtcggctgagaaaggcgcccgagagtttggcgtacatgttttgggccgcaatgcgcgtggcgcccgtcaccacacagtccaagacctcgttgattgtctgcacgcacgtgctctttccggagccagcgttgccggtgataagatacaccgcgaacggaaactccctgaggggcaggcctgcgggggactctaaggccgccacgtcccggaaccactgcagacggggcacttgcgctccgtcgagctgttgttgcgagagctctcggatgcgcttaaggattggctgcaccccgtgcatagacgtaaaatttaaaaaggcctcggccctccctggaacggctggtcggtccccgggttgctgaaggtgcggcgggccgggtctctgtccgtctagctggcgctccccgccggccgccgccatgaccgcaccacgctcgcgggcccccactacgcgtgcgcggggggacacggaagcgctgtgctcccccgaggacggctgggtaaaggttcaccccacccccggtacgatgctgttccgcgagattctccacgggcagctggggtataccgagggccagggggtgtacaacgtcgtccggtccagcgaggcgaccacccggcagctgcaggcggcgatctttcacgcgctcctcaacgccaccacttaccgggacctcgaggcggactggctcggccacgtggcggcccgcggtctgcagccccaacggctggttcgccggtacaggaacgcccgggaggcggatatcgccggggtggccgagcgggtgttcgacacgtggcggaacacgcttaggacgacgctgctggactttgcccacgggttggtcgcctgctttgcgccgggcggcccgagcggcccgtcaagcttccccaaatatatcgactggctgacgtgcctggggctggtccccatattacgcaagcgacaagaagggggtgtgacgcagggtctgagggcgtttctcaagcagcacccgctgacccgccagctggccacggtcgcggaggccgcggagcgcgccggccccgggttttttgagctggcgctggccttcgactccacgcgcgtggcggactacgaccgcgtgtatatttactacaaccaccgccggggcgactggctcgtgcgagaccccatcagcgggcagcgcggagaatgtctggtgctgtggcctcccttgtggaccggggaccgtctggtcttcgattcgcccgtacagcggctgtttcccgagatcgtcgcgtgtcactccctccgggaacacgcgcacgtctgccggctgcgcaataccgcgtccgtcaaggtgctgctggggcgcaagagcgacagcgagcgcggggtggccggcgccgcgcgggtcgttaacaaggtgttgggggaggacgacgagaccaaggccgggtcggccgcctcgcgcctcgtgcggcttatcatcaacatgaagggcatgcgccacgtaggcgacattaacgacactgtgcgtgcctacctcgacgaggccggggggcacctgatagacgccccggccgtcgacggtaccctcccgggattcggcaagggcggaaacagccgcgggtctgcgggccaggaccagggggggcgggcgccgcagcttcgccaggccttccgcacggccgtggttaacaacatcaacggcgtgttggagggctatataaataacctgtttggaaccatcgagcgcctgcgcgagaccaacgcgggcctggcgacccagttgcaggagcgcgaccgcgagctccggcgcgcaacatcgggggccctggagcgccagcagcgcgcggccgacctggcggccgagtccgtgaccgggggatgcggcagccgccctgcgggggcggacctgctccgggccgactatgacattatcgacgtcagcaagtccatggacgacgacacgtacgtcgccaacagttttcagcacccgtacatcccttcgtacgcccaggacctggagcgcctgtcgcgcctctgggagcacgagctggtgcgctgtttcaaaattctgtgtcaccgcaacaaccagggccaagagacgtcgatctcgtactccagcggggcgatcgccgcattcgtcgccccctactttgagtcagtgcttcgggccccccgggtaggcgcgcccatcacgggctccgatgtcatcctgggggaggaggagttatgggatgcggtgtttaagaaaacccgcctgcaaacgtacctgacagacatcgcggccctgttcgtcgcggacgtccagcacgcagcgctgcccccgcccccctccccggtcggcgccgatttccggcccggcgcgtccccgcggggccggtccagatcgcggtcgcccggaagaactgcgcgaggcgcgccggaccagggcgggggcatcgggcaccgggatggccgccgcgacggccgacgatgaggggtcggccgccaccatcctcaagcaggccatcgccggggaccgcagcctggtcgaggcggccgaggcgattagccagcagacgctgctccgcctggcctgcgaggtgcgccaggtcggcgaccgccagccgcggtttaccgccaccagcatcgcgcgcgtcgacgtcgcgcctgggtgccggttgcggttcgttctggacgggagtcccgaggacgcctatgtgacgtcggaggattactttaagcgctgctgcggccagtccagttatcgcggcttcgcggtggcggtcctgacggccaacgaggaccacgtgcacagcctggccgtgccccccctcgttctgctgcaccggttctccctgttcaaccccagggacctcctggactttgagcttgcctgtctgctgatgtacctggagaactgcccccgaagccacgccaccccgtcgacctttgccaaggttctggcgtggctcggggtcgcgggtcgccgcacgtccccattcgaacgcgttcgctgccttttcctccgcagttgccactgggtcctaaacacactcatgttcatggtgcacgtaaaaccgttcgacgacgagttcgtcctgccccactggtacatggcccggtacctgctggccaacaacccgccccccgttctctcggccctgttctgtgccaccccgacaagctcctcattccggctgccggggccgcccccccgctccgactgcgtggcctataaccccgccgggatcatggggagctgctgggcgtcggaggaggtgcgcgcgcctctggtctattggtggctttcggagaccccaaaacgacagacgtcgtcgctgttttatcagttttgttgaattttaggaaataaacccggttttgtttctgtggcctcccgacggatgcgcgtgtccttactccgtcttggtgggtgggtggctgtgtatggcgtcccatctgtgcggggaggggggcaagtcggcacgtattcggacagactcaagcacacacgggggagcgctcttgtctcagggcaatgtttttattggtcaaactcaggcaaacagaaacgacatcttgtcgtcaaagggatacacaaacttccccccctcgccccatactcccgccagcaccccggtaaacaccaactcaatctcgcgcaggatttcgcgcaggtgatgagcgcagtccacgggggggagcacaaggggccgcgggtatagatcgacggggacgccgaccgactccccgcctccgggacagacacgcacgacgcgccgccagtagtgctctgcgtccagcaaggcgccgccgcggaaggcagtggggggcaaggggtcgctggcctcaaagggggacacccgaacgctccagtactccgcgtccaaccgtttattaaacgcgtccaagataaggcggtcgcaggcgtcctccataaggccccgggccgtgagtgcgtcctcctccggcacgcctgccgttgtcaggcccaggacccgtcgcagcgtgtcgcgtacgaccccggccgccgtggtgtacgcgggcccgcggagaggaaatcccccaagatggtcagtgttgtcgcgggagttccagaaccacactcccgcctggctccaggcgactgcgtgggtgtagacgccctcgagggccaagcacagtgggtgccgcagccggaggccgttggccctaagcacggctcccacggccgtctcgatggcccgccgggcgtcctcgatcaccccggaagccgcatccgcgtcttgggggtccacgttaaagacaccccagaacgcacccccatcgcccccgcagaccgcgaacttcaccgagctggccgtctcctcgatctgcaggcagacggcggccattaccccacccaggagctgccgcagcgcagggcaggcgttgcacgtgtccgggaccaggcgctccaagacggccccggcccagggctctgagggagcggccaccaccagcgcgtccagtcttgctaggcccgtccggccgtgggggtccgccagcccgctccccccgaggtcggccagggccgccaggagctgggcgcgaagtccggggaagcaaaaccgcgccgtccagacgggcccgacggccgcgggcgggtctaacagttggatgattttagtggcgggatgccaccgcgccaccgcctcccgcactgcgggcaggaggcatccggctgccgccgaggccacgccgggccaggctcgcggggggaggacgaccctgacccccaccgcgggccaggcccccaggagcgcggcgtaagcggccgcggccccgcgcaccaggtcccgtgccgactcggccgtggccggcacggtgaacgtgggccaacccggaaaccccaggacggcaaagtacgggacgggtcccccccggacctcaaactcgggccccagaaaggcaaagacgggggccagggccccgggggcggcgtggaccgtggtatgccactgccggaaaagggcgacgagcgccggcgcggagaacttctcgccggcgcttacaaagtagtcgtaatcgcggggcagcagcacccgtgccgtgactcgttgtgggtgcccgcgtggccgcaggcccacctcgcacacctcgaccaggtccccgaacgcgccctccttcttgatcggcggaaacgcaagagtctggtattcgcgcgcaaatagcgcggttccggtggtgatgttaacggtcagcgaagcggtggacgcgcactggggggtgtcgcgaatggccgccaggcgcgcccacgccagccgcgcgtcgggatgctcggcaacgcgcgccgccagggccatagggtcgatgtcaatgttggcctccgcgaccaggagagcggcgcgaggggcggcgggcgggccccacgacgctctctcaactttcaccaccagtcccgtgcgtgggtccgagccgatacgcagcggggcgaacagggccaccggcccggtctggcgctccagggccgccaggacgcacgcgtacagcgcccgccacagagtcgggttctccaggggctccagcggggaggcggccggcgtcgtcgcggcgcgggcggccgccacgacggcctggacggagacgtccgcggagccgtagaaatcccgcagctccgtcgcggtgacggagacctccgcaaagcgcgcgcgaccctcccctgcggcgttgcgacatacaaaatacaccagggcgtggaagtactcgcgagcgcgggggggcagccataccgcgtaaagggtaatggcgctgacgctctcctccacccacacgatatctgcggtgtccatcgcacggcccctaaggatcacgggcggtctgtgggtcccatgctgccgtgcctggccgggcccggtgggttgcggaaaccggtgacgggggggggggcggtttttggggttggggtgggaaacggcccgggtccgggggccaacttggcccctcggtgcgttccggcaacagcgccgccggtccgcggacgaccacgtaccgaacgagtgcggtcccgagacttatagggtgctaaagttcaccgccccctgcatcatgggccaggcctcggtggggagctccgacagcgccgcctccaggatgatgtcagcgttggggttggcgctggatgagtgcgtgcgcaaacagcgcccccacgcgggcacgcgtagcttgaagcgcgcgcccgcaaactcccgcttgtgggccataagcagggcgtacagctgcctgtgggtccggcaggcgctgtggtcgatgtggtgggcgtccaacaaccccacgattgtctgtttggtgaggtttttaacgcgccccgccccgggaaacgtctgcgtgcttttggccatctgcacgccaaacagttcgccccagattatcttgaacagcgccaccgcgtggtccgtctcactaacggaccgcgcgggggacagccgcttagggcgtcggcgacgcgcttgacggcttcctccgagagcagaagtccgtcggttacgttacagtggcccagttcgaacaccagctgcatgtagcggtcgtagtggggggtcagcaggtccagcacgtcatcggggccgaaggtcctcccagatcccccggccgccgagtcccaatgcaggcgcgcggccatggtgctgcacaggcacaacagctcccagacaggggttacgttcagggtggggggcagggccacgagctccagctctccggtgacgttgatcgtggggatgacgcccgtggcgtagtggtcatagatccgccgaaatatggcgctgctgcgggtggccatgggaacgcggagacaggcctccagcaacgccaggtaaataaaccgcgtgcgtcccatcaggctgttgaggttgcgcatgagcgcgacaatttccgccggcgcgacatcggaccggaggtatttttcgacgaaaagacccacctcctccgtctcggcggcctgggccggcagcgacgcctcgggatcccggcaccgcagctcccgtagatcgcgctgggccctgagggcgtcgaaatgtacgccccgcaaaaacagacagaagtcctttggggtcagggtatcgtcgtgtccccagaagcgcacgcgtatgcagtttagggtcagcagcatgtgaaggatgttaaggctgtccgagagacacgccagcgtgcatctctcaaagtagtgtttgtaacggaatttgttgtagatgcgcgacccccgccccagcgacgtgtcgcatgccgacgcgtcacagcgccccttgaaccggcgacacagcaggtttgtgacctgggagaactgcgcgggccactggccgcaggaactgaccacgtggttcaggagcatgggcgtaaagacgggctccgagcgcgccccggagccgtccatgtaaatcagtagctcccccttgcggagggtgcgcacccgtcccagggactggtacacggacaccatgtccggtccgtagttcatgggtttcacgtaggcgaacatgccatcaaagtgcaggggatcgaagctgaggcccacggttacgaccgtcgtgtatataaccacgcggtattggccccacgtggtcacgtccccgaggggggtgagcgagtgaagcaacagcacgcggtccgtaaactgacggcagaaccgggccacgatctccgcgaaggagaccgtcgacgaaaaaatgcagatgttatcgcccccgccaaggcgcgcttccagctccccaaagaacgtggccccccgggcgtccggagaggcgtccggagacgggccgctcggcggcccgggcgggcgcagggcagcctgcaggagctcggtccccagacgcgggagaaacaggcaccggcgcgccgaaaacccgggcatggcgtactcgccgaccaccacatgcacgtttttttcgccccggagaccgcacaggaagtccaccaactgcgcgttggcggttgcgtccatggcgatgatccgaggacatgtgcgcagcaggcgtagcattaacgcatccacgcggcccagttgctgcatcgttggcgaatagagctggcccagcgtcgacataacctcgtccagaacgaggacgtcgtagttgttcagaaggttggggcccacgcgatgaaggctttccacctggacgataagtcggtggaaggggcggtcgttcataatgtaattggtggatgagaagtaggtgacaaagtcgaccaggcctgactcagcgaaccgcgtcgccagggtctgggtaaaactccgacgacaggagacgacgagcacactcgtgtccggagagtggatcgcttcccgcagccagcggatcagcgcggtagtttttcccgaccccattggcgcgcggaccacagtcacgcacctggccgtcggggcgctcgcgttggggaaggtgacgggtccgtgctgctgccgctcgatcgttgttttcgggtgaacccggggcacccattcggccaaatcccccccgtataacatccgcgctagcgatacgctcgacgtgtactgttcgcactcgtcgtccccaatgggacgcccggcccccagaggatcccccgactccgcgccccccacgaaaggcatgaccggggcgcggacggcgtggtgggtctggtgtgtgcaggtggcgacgtttgtggtctctgcggtctgcgtcacggggctcctcgtcctggcctctgtgttccgggcacggtttccctgcttttacgccacggcgagctcttatgccggggttaactccacggccgaggtgcgcgggggtgtagccgtgcccctcaggttggacacgcagagccttgtgggcacttatgtaatcacggccgtattgttgttggccgcggccgtgtatgccgtggtcggcgccgtgacctcccgctacgaccgcgccctggacgcgggccgccgtctggctgcggcccgcatggccatgccgcacgccacgctgatcgccggaaacgtctgctcttggttgctgcagatcaccgtcctgctgctggcccatcgcatcagccagctggcccacctggtttacgtcctgcactttgcgtgtctggtgtattttgcggcccatttttgcaccaggggggtcctgagcgggacgtatctgcgtcaggtgcacggcctgatggagctggccccgacccatcatcgcgtcgtcggcccggctcgcgccgtgctgacaaacgccttgctgttgggcgtcttcctgtgcacggccgacgccgcggtatccctgaataccatcgccgcgttcaactttaatttttcggccccgggcatgctcatctgcctgaccgtgctgttcgccattctcgtcgtatcgctgttgttggtggtcgagggggtgttgtgtcactacgtgcgcgtgttggtgggcccccacctgggggccgttgccgccacgggcatcgtcggcctggcctgcgagcactattacaccaacggctactacgtggtggagacgcagtggccgggggcacagacgggagtgcgcgtcgccctcgccctggtcgccgcctttgccctcggcatggccgtgctccgctgcacccgcgcctatctgtatcacaggcggcaccacaccaaattttttatgcgcatgcgcgacacgcgacaccgcgcacattccgccctcaagcgcgtacgcagttccatgcgcggatcgcgagacggccgccacaggcccgcgcccggcagcccgcccgggattcccgaatatgcggaagacccctacgcgatctcatacggcggccagctcgaccggtacggagattccgacggggagccgatttacgacgaggtggcggacgaccaaaccgacgtattgtacgccaagatacaacacccgcggcacctgcccgacgacgagcccatctatgacaccgttggggggtacgaccccgagcccgccgaggaccccgtgtacagcaccgtccgccgttggtagctgtttggttccgttttaataaaccgtttgtgtttaacccgaccgtggtgtatgtctggtgtgtggcgtccgatcccgttactatcaccgtccccccccctcaaccccggcgattgtgggttttttaaaaacgacacgcgtgcgaccgtatacagaacattattttggtttttattcgctatcggacatggggggtggaaactgggtggcggggcaggcgcctccgggggtccgccggtgagtgtggcgcgagggggggtccgacgaacgcaggcgcggtctccccggggcccgcgtaaccacgcgcatatccgggggcacgtagaaattaccttcctcttcggactcgatatccacgacgtcaaagtcgtgggcggtcagcgagacgacctccccgtcgtcggtgatgaggacgttgtttcggcagcagcagggccgggccccggagaacgagaggcccatagctcggcgagcgtgtcgtcgaacgccaggcggctgcttcgctggatggccttatagatctccggatcgatgcggacgggggtaatgatcagggcgatcggaacggcctggttcgggagaatggacgccttgctgggtcctgcggccccgagagccccggcgccgtcctccaggcggaacgttacgccctcctccgcgctggtgcggtgcctgccgataaacgtcaccagatgcgggtggggggggcagtcggggaagtggctgtcgagcacgtagccctgcaccaagatctgcttaaagttcgggtggcgggggttcgcgaagacgggctcgcggcggaccagatccccggagctccaggacacgggggagatggtgtggcgtccgaggtcgggggcgccaaacagaagcacctccgagacaacgccgctatttaactccaccaaggcccgatccgcggcggagcaccgccttttttcgcccgaggcgtgggcctctgaccaggcctggtcttgcgtgacgagagcctcctccgggccggggacgcgcccgggcgcgaagtatcgcacgctgggcttcgggatcgaccggataaatgcccggaacgcctccggggaccggtgtgccatcaagtcctcgtacgcggaggccgtggggtcgctggggtccatggggtcgaaagcgtacttggcccggcatttgacctcgtaaaaggccaggggggtcttggggactggggccaggtagccgtgaatgtcccgaggacagacgagaatatccagggacgccccgaccatccccgtgtgaccgtccatgaggaccccacacgtatgcacgttctcttcggcgaggtcgctgggttcgtggaagataaagcgccgcgtgtcggcgccggcctcgccgccgtcgtccgcgcggcccacgcagtagcgaaacagcaggcttcgggccgtcggctcgttcacccgcccgaacatcaccgccgaagactgtacatccggtcgcaggctggcgttgtgcttcagccactggggcgagaaacacggaccctgggggccccagcggagggtggatgcggtcgtgaggccccgccggagcagggcccatagctggcagtcggcctggttttgcgtggccgcctcgtaaaaccccatgaggggccggggcgccacggcgtccgcggcggccgggggggcgcggcgcgtcaggcgccataggtgccggccgagtccgcggtccaccatacccgcctcctcgaggaccacggccagggaacacagataatccaggcgggcccagaggggaccgatggccagaggggcgcggacgccgcgcagcaacccgcgcaggtggcgctcgaacgtctcggctagtatatgggagggcagcgcgttggggatcaccgacgccgaccacatagagtcaaggtccggggagtcgggatcggcgtccgggtcgcgggcgtgggtgcccccaggagatagcggaatgtccggggtcggaggcccggaggcgtcagaaagtgccggcgacgcggcccggggcttttcgtctgcggtgtcggtggcgtgctgatcacgtggggggttatcgggcgaatgggagctcgggtccacagctgacgtcgtctggggtggggggggcaggggacggaaggtggttgtcagcggaagactgttagggcgggggcgcttgggggggctgtcggggccacgaggggtgtcctcggccagggcccagggacgcttagtcacggtgcgtcccggcggacatgctgggcctaccgtggactccatttccgagacgacgtggggggagcggtggttgagcgcgccgccgggtgaacgctgattctcacgacagcgcgtgccgcgcgcacgggttggtgtgatacaggcgggacaccagcaccaggagaggcttaagctcgggaggcagcgccaccgacgacagtatcgccttgtgtgtgtgctggtaatttatacaccgatccgtaaacgcgcgccgaatcttgggattgcggaggtggcgccggatgccctctgggacgtcatacgccaggccgtgggtgttggtctcggccgagttgacaaacagggctgggtgcagcacgcagcgataggcgagcagggccagggcgaagtccggcgacagctggttgttgaaatactggtaaccgggaaaccgggtcacgggtacgcccaggctcggggcgacgtacacgctaaccaccaactccagcagcgtctggcccagggcgtacaggtcaaccgctagcccgacgtcgtgcttcaggcggtggttggtaaattcggcccgttcgttgttaaggtatttcaccaacagctccgggggctggttatacccgtgacccaccagggtgtgaaagttggctgtggttagggcggtgggcatgccaaacatccggggggacttgaggtccggctcctggaggcaaaactgcccccgggcgatcgtggagttggagttgagggtgacgaggctaaagtcggcgaggacggcccgccggagcgagacggcgtccgaccgcagcatgacgaggatgttggcgcacttgatatccaggtggctgatcccgcaggtggtgtttaaaaacacaacggcacgggccagctccgtgaagcactggtggagggccgtcgagaccgaggggtttgttgtgcgcagggacgccagttggccgatatacttaccgaggtccatgtcgtacgcggggaacactatctgtcgttgttgcagcgagaacccgaggggcgcgatgaagccgcggatgttgtgggtgcggccggcgcgtagagcgcactccccgaccaacagggtcgcgatgagctcaacggcaaaccactccttttcctttatggtcttaacggcaagcttatgttcgcgaatcagttggacttcgccgtatcccccagaccccccgaagcttcgggccccggggatctcgagggtcgtgtagtgtagggcggggttgatggcgaacacggggctgcatagcttgcggatgcgcgtgagggtgaggatgtgcgagggggacgaggggggtgcggttaacgccgcctgggatctgcgcaggggcgggcggttcagtttggccgccgtaccgggcgcctcgggggacgcgcggcgatgagacgagcggctcattcgccatcgggatagtcccgcgcgaagccgctcgcggaggccggatcggtggcggcacccgtgggaggagcgggagacggcggcgttctggagagaggggccgctggggcgcccggaggccccatgggggttggagtgtatgtaggatgcgagccaatccttgaaggaccgttggcgtgcaccttgggggctgaggttagctgccacatgaccagcaggtcgctgtctgcgggactcatccatccttcggccaggtcgccgtctccccacagagaagcgttggtcgctgcctcctcgagttgctcctcctggtccgcaagacgatcgtccacggcgtccaggcgctcaccaagcgccggatcgaggtaccgtcggtgtgcggttagaaagtcacgacgcgccgcttgctcctccacgcgaattttaacacaggtcgcgcgctgtcgcatcatctctaagcgcgcgcgggactttagccgcgcctccaattccaagtgggccgcctttgcagccataaaggcgccaacaaaccgaggatcttgggtgctgacgccctcccggtgcagctgcagggtctggtccttgtaaatctcggctcggaggtgcgtctcggccaggcgtcggcgcagggccgcgtgggcggcatctcggtccattccgccaccctgcgggcgacccgggggtgctctgatagtctcgcgtgcccaaggcccgtgatcggggtacttcgccgccgcgacccgccacccggtgtgcgcgatgtttggtcagcagctggcgtccgacgtccagcagtacctggagcgcctcgagaaacagaggcaacttaaggtgggcgcggacgaggcgtcggcgggcctcacaatgggcggcgatgccctacgagtgccctttttagatttcgcgaccgcgacccccaagcgccaccagaccgtggtcccgggcgtcgggacgctccacgactgctgcgagcactcgccgctcttctcggccgtggcgcggcggctgctgtttaatagcctggtgccggcgcaactaaaggggcgtgatttcgggggcgaccacacggccaagctggaattcctggcccccgagttggtacgggcggtggcgcgactgcggtttaaggagtgcgcgccggcggacgtggtgcctcagcgtaacgcctactatagcgttctgaacacgtttcaggccctccaccgctccgaagcctttcgccagctggtgcactttgtgcgggactttgcccagctgcttaaaacctccttccgggcctccagcctcacggagaccacgggcccccccaaaaaacgggccaaggtggacgtggccacccacggccggacgtacggcacgctggagctgttccaaaaaatgatccttatgcacgccacctactttctggccgccgtgctcctcggggaccacgcggagcaggtcaacacgttcctgcgtctcgtgtttgagatccccctgtttagcgacgcggccgtgcgccacttccgccagcgcgccaccgtgtttctcgtcccccggcgccacggcaagacctggtttctggtgcccctcatcgcgctgtcgctggcctcctttcgggggatcaagatcggctacacggcgcacatccgcaaggcgaccgagccggtgtttgaggagatcgacgcctgcctgcggggctggttcggttcggcccgagtggaccacgttaaaggggaaaccatctccttctcgtttccggacgggtcgcgcagtaccatcgtgtttgcctccagccacaacacaaacgtaagtcctcttttctttcgcatggctctcccaaggggccccgggtcgacccgacccacacccacccacccacatacacacacaaccagacgcgggaggaaagtctgccccgtgggcactgatttttattcgggatcgcttgaggaggcccgggcaacggcccgggcaacggtggggcaactcgtagcaaataggcgactgatgtacgaagagaagacacacaggcgccacccggcgctggtcggggggatgttgtccgcgccgcaccgtcccccgacgacctcttgcagacggtccgtgatgcaaggacggcggggggcctgcagcagggtgaccgtatccacgggatggccaaagagaagcggacacaggctagcatccccctggaccgccagggtacactgggccatcttggcccacagacacggggcgacgcagggacaggactccgttacgacggaggagagccacagtgcgttggcggaatcgatgtggggcggcggggcgcaggactcgcagccccccgggtggttagtgatcctggccaggagccatcccagatggcgggccctgcttcccggtggacagagcgaccccaggtcgctgtccatggcccagcagtagatctggccgctggggaggtgccaccaggcccccgggcccaaggcgcagcacgcgcccggctccgggggggtcttcgcggggaccagatacgcgccatccagctcgccgaccactggctcctccgcgagctgttcggtggttgggtcgggggtttcctccgggggggtggccgcccgtatgcgggcgaacgtgagggtgcacaggagcggggtcagggggtgcgtcacgctccggaggtggacgatcgcgcagtagcggcgctcgcggttaaagaaaaagagggcaaagaaggtgttcgggggcaaccgcagcgccttggggcgcgtcagatacagaaaaatctcgcagaagagggcgcgcccggggtctgggttaggaagggccacctgacacagaggctcggtgaggaccgttagacaccgaaagatcttgagccgctcgtccgcccgaacgacgcgccacacaaagacggagttgacaatgcgcgcgatagagtcgacgtccgtccccaggtcgtcgactctgtcgcgcgtgccgcgagctccggcccgggaatccggccggggcaaggtccccgggggaccaggcggcgccaggggccgccggggtcccagctgcgccatgccgggggcggggggagggcaaaccccagaggcgggggccaacggcgcggggaggagtggatgggcgaggtggccgggggaaggcgcccgctagcgagaacggccgttcccggacgacaccttgcgacaaaacctaaggacagcggcccgcgcgacggggtccgagaggctaaggtaggccgcgatgttaatggtgaacgcaaagccgccgggaaagacaactatgccacagaggcggcgattaaaccccaggcagaggtaggcgtagctttccccgggcaggtattgctcgcagaccctgcgtggggctgtggaggggacggcctccatgaagcgacatttactctgctcgcgtttactgacgtcaccatccatcgccacggcgattggacgattgttaagccgcagcgtgtctccgcttgtgctgtagtagtcaaaaacgtaatggccgtcggagtcggcaaagcgggccgggaggtcgtcgccgagcgggacgacccgccgcccccgaccgccccgtccccccaggtgtgccaggacggccagggcatacgcggtgtgaaaaaaggcgtcgggggcggtcccctcgacggcgcgcatcaggttctcgaggagaatggggaagcgcctggtcacctcccccagccacgcgcgttggtcggggccaaagtcatagcgcaggcgctgtgagattcgcgggccgccctgaagcgcggcccggatggcctggcccagggcccggaggcacgccagatgtatgcgcgcggtaaaggcgacctcggcggcgatgtcaaagggcggcaggacggggcgcgggtggcgcaggggcacctcgagcgcgggaaagcggagcagcagctccgcctgcccagcgggagacagctggtgggggcgcacgacgcgttctgcggcgcaggcctcggtcagggccgtggccagcgccgaggacagcagcggagggcgggcgcgtcgcccgccccacgccactgagttctcgtaggagacgacgacgaagcgctgcttggttccgtagtggtggcgcaggaccacggagatagaacgacggctccacagccagtccggccggtcgccgccggccagggcttcccatccgcgatccaaccactcgaccagcgaccgcggctttgtggtaccaggggtaagggttagaacgtcgttcaggatgtcctcgcccccgggcccgtggggcgctggggccacaaagcggcccccgccggggggctccagacccgccagcaccgcatctgcgtcagccgcccccatggcgcccccgctgacggcctggtgaaccagggcgccctggcggagccccgatgcaacgccacaggccgcacgcccggtccgagcgcggaccgggtggcggcgggtgacgtcctgcactgcccgctgaaccaacgcgaggatctcctcgttctcctgtgcgatggacacgtcctgggccgcggtcgtgtcgccgccgggggccgtcagctgctcctccggggagatgggggggtcggacgccccgacgatgggcgggtctgcgggcgcccccgcgtggggccgggccaagggctgcggacgcggggacgcgctttcccccagacccatggacaggtgggccgcggcctccttcgcggccggcggggcggcggcgccaagcagagcgacgtagcggcacaaatgccgacagacgcgcatgatgcgcgtgctgtcggccgcgtagcgcgtgttgggggggacgagctcgtcgtaactaaacagaatcacgcgggcacagctcgcccccgagccccacgcgaggcgcagcgccgccacggcgtacgggtcatagacgccctgcgcgtcacacaccacgggcagggagacgaacaaccccccggcgctggacgcacgcggaaggaggccagggtgtgccggcacgacgggggccagaagctcccccaccgcatccgcgggcacgtaggcggcaaacgccgtgcaccacggggtacagtcgccggtggcatgagcccgagtctggatttcgacctggaagtttgcggccgtcccgagtccggggcggccgcgcatcagggcggccagagggattcccgcggccgccaggcactcgctggatatgatgacgtgaaccaaagacgagggccgacccgggccgtggccgagatcgtactggacctcgttggccaagtgcgcgttcatggttcggggtgggtgtgggtgtgtaggcgatgcgggtcccccgagtccgcgggaagggcgtgggtttggcgcgcgtatgcgtattcgccaacggaggcgtgcgtgcttatgcgcggcgcgtttcttctgtctccagggaatccgaggccaggactttaacctgctctttgtcgacgaggccaactttattcgcccggatgcggtccagacgattatgggctttctcaaccaggccaactgcaagattatcttcgtgtcgtccaccaacaccgggaaggccagtacgagctttttgtacaacctccgcggggccgccgacgagcttctcaacgtggtgacctatatatgcgatgatcacatgccgagggtggtgacgcacacaaacgccacggcctgttcttgttatatcctcaacaagcccgttttcatcacgatggacggggcggttcgccggaccgccgatttgtttctggccgattccttcatgcaggagatcatcgggggccaggccagggagaccggcgacgaccggcccgttctgaccaagtctgcgggggagcggtttctgttgtaccgcccctcgaccaccaccaacagcggcctcatggcccccgatttgtacgtgtacgtggatcccgcgttcacggccaacacccgagcctccgggaccggcgtcgctgtcgtcgggcggtaccgcgacgattatatcatctttgccctggagcacttttttctccgcgcgctcacgggctcggcccccgccgacatcgcccgctgcgtcgtccacagtctgacgcaggtcctggccctgcatcccggggcgtttcgcggcgtccgggtggcggtcgagggaaatagcagccaggactcggccgtcgccatcgccacgcacgtgcacacagagatgcaccgcctactggcctcggagggggccgacgcgggctcgggccccgagcttctcttctaccactgcgagcctcccgggagcgcggtgctgtacccctttttcctgctcaacaaacagaagacgcccgcctttgaacactttattaaaaagtttaactccgggggcgtcatggcctcccaggagatcgtttccgcgacggtgcgcctgcagaccgacccggtcgagtatctgctcgagcagctgaataacctcaccgaaaccgtctcccccaacactgacgtccgtacgtattccggaaaacggaacggcgcctcggatgaccttatggtcgccgtcattatggccatctaccttgcggcccaggccggacctccgcacacattcgctcccatcacacgcgtttcgtgagcgcccaataaacacacccaggtatgctacgcacgaccacggtgtcgcctgttaaggggggggaagggggtgttggcgggaagcgtgggaacacgggggattctctcacgaccggcaccagtaccacccccctgtgaacacagaaacccaacccaaatcccataaacatacgacacacaggcatattttggaatttcttgggtttttatttatttaggtatgctggggtttctccctggatgcccaccccccacccccccccgtgggtctagccgggccttagggatagcgtataacgggggccatgtctccggaccgcacaacggccgcgccgtcaaaggtgcacacccgaaccacgggagccagggccaaggtgtctcctagttggcccgcgtgggtcagccaggcgacgagcgcctcgtaaagcggcagccttcgctctccatcctgcaccagggccggggcttcggggtgaatgagctgggcggcctcccgcgtgacactctgcatctgcaggagagcgttcacgtacccgtcctgggcacttagcgcaaagagccgggggattagcgtaaggatgatggtggttccctccgtgatcgagtaaaccatgttaaggaccagcgatcgcagctcggcgtttacgggaccgagttgttggacgtccgccagcagcgagaggcgactcccgttgtagtacagcacgttgaggtctggcagccctccggggtttctggggctggggttcaggtcccggatgcccctggccacgagccgcgccacgatttcgcgcgccaggggcgatggaagcggaacgggaaaccgcaacgtgaggtccagcgaatccaggcgcacgtccgtcgcttggccctcgaacacgggcgggacgaggctgatggggtccccgttacagagatctacgggggaggtgttgcgaaggttaacggtgccggcgtgggtgaggcccacgtccagggggcaggcgacgattcgcgtgggaagcacccgggtgatgaccgcggggaagcgccttcggtacgccagcaacaaccccaacgtgtcgggactgacgcctccggagacgaaggattcgtgcgccacgtcggccagcgtcagttgccggcggatggtcggcaggaataccacccgcccttcgcagcgctgcagcgccgccgcatcggggcgcgagatgcccgagggtatcgcgatgtcagtttcaaagccgtccgccagcatggcgccgatccacgcggcagggagtgcagtggtggttcgggtggcgggaggagcgcggtgggggtcagcggcgtagcagagacgggcgaccaacctcgcataggacggggggtgggtcttagggggttgggaggcgacagggaccccagagcatgcgcggggaggtctgtcgggcccagacgcaccgagagcgaatccgtccacggagtcccggtctgggttttatggggcccggccctcggaatcgcggcttgtcggcggggacaaagggggcggggctagggggcttgcggaaacagaagacgcgtgggataaaagaatcgcactaccccaaggaagggcggggcggtttattacagagccagtcccttgagcggggatgcgtcatagacgagatactgcgcgaagtgggtctcccgcgcgtgggcttccccgttgcgggcgctgcggaggagggcggggtcgctggcgcaggtgagcgggtaggcctcctgaaacaggccacacgggtcctccacgagttcgcggcaccccggggggcgcttaaactgtacgtcgctggcggcggtggccgtggacaccgccgaacccgtctccacgatcaggcgctccaggcagcgatgtttggcggcgatgtcggccgacgtaaagaacttaaagcaggggctgagcaccggcgaggccccgttgaggtggtaggccccgttatagagcaggtccccgtacgaaaatcgctgcgacgcccacgggttggccgtggccgcaaaggcccgggacgggtcgctctggccgtggtcgtacatgagggcggtgacatccccctccttgtcccccgcgtaaacgcccccggcggcgcgtccccgggggttgcagggccggcggaagtagttgacgtcggtcgacacgggggtggcgataaactcacacacggcgtcctggccgtggtccatccctgcgcgccgcggcacctgggcgcacccgaacacggggacgggctgggccggccccaggcggtttcccgccacgaccgcgttccgcaggtacacggctgccgcgttgtccaggagagggggagccccgcggcccaggtaaaagttttggggaaggttgcccatgtcggtgacggggttgcggacggttgccgtggccacgacggcggtgtagcccacgcccaggtccacgttcccgcgcggctgggtgagcgtgaagtttacccccccgccagtttcgtgccgggccacctggagctggcccaggaagtacgcctccgacgcgcgctccgagaacagcatgttctcagtcacaaagcggtcctgtcggacgacggtgaacccaaacccgggatggaggcccgtcttgagctgatgatgcaaggccacgggactgatcttgaagtaccccgccatgagcgcgtaggtcagcgcgttctccccggccgcgctctcgcggacgtgctgcacgacgggctgtcggatcgacgaaaagtagttggcccccagagccggggggaccagggggacctgccgcgacaggtcgcgcagggccggggggaaattgggcgcgttcgccacgtggtcggccccggcgaacagcgcgttgacgggaagggggtaaaaatagtcgccattttggatggtatggtccagatgctggggggccatcagcaggattccggcgtgcaacgccccgtcgaatatgcgcatgttggtggtggacgcggtgttggcgcccgcgtcgggcgccgccgagcagagcagcgccgttgtgcgttcggccatgttgtgggccagcacctgcagcgtgagcatggcgggcccgtccactaccacgcgcccgttgtgaaacatggcgttgaccgtgttggccaccagattggccgggtgcagggggtgcgcggggtccgtcacggggtcgctggggcactcctcgccgggggcgatctccgggaccaccatgttctgcagggtggcgtatacgcggtcgaagcgaacccccgcggtgcagcagcggccccgcgagaaggcgggcaccatcacgtagtagtaaatcttgtggtgcacggtccagtccgccccccggtgcggccggtcatccgcggcgtccgcggctcgggcctgggtgttgtgcagcagctggccgtcgttgcggttgaagtccgcggtcgccacgttacatgccgccgcgtacacggggtcgtggccccccgcgctaacccggcagtcgcgatggcggtccagggccgcgcgccgcatcagggcgtcacagtcccacacgaggggtggcagcagcgccgggtctcgcattaggtgattcagctcggcttgcgcctgcccgcccagctccgggccggtcagggtaaagtcatcaaccagctgggccagggcctcgacgtgcgccaccaggtcccggtacacggccatgcactcctcgggaaggtctcccccgaggtaggtcacgacgtacgagaccagcgagtagtcgttcacgaacgccgcgcaccgcgtgttgttccagtagctggtgatgcactggacaacgagccgggccagggcgcagaagacgtgctcgctgccgtgtatggcggcctgcagcaggtaaaacaccgccgggtagttgcggtcgtcgaacgccccgcgaacggcggcgatggtggcgggggccatggcgtggcgtcccacccccagctccaggccccgggcgtcccggaacgccgccggacatagcgccaggggcaagttgccgttcaccacgcgccaggtggcctggatctcccccgggccggccgggggaacgtccccccccggcagctccacgtcggccacccccacgaagaagtcgaacgcggggtgcagctcaagagccaggttggcgttgtcgggctgcataaactgctccggggtcatctggccttccgcgacccatcggacccgcccgtgggccaggcgctgcccccaggcgttcaaaaacagctgctgcatgtctgcggcggggccggccggggccgccacgtacgccccgtacggattggcggcttcgacggggtcgcggttaaggcccccgaccgccgcgtcaacgttcatcagcgaagggtggcacacggtcccgatcgcgtgttccagagacaggcgcagcacctggcggtccttcccccaaaaaaacagctggcggggcgggaaggcgcggggatccgggtggccgggggcggggactaggtccccggcgtgcgcggcaaaccgttccatgaccggattgaacaggcccaggggcaggacgaacgtcaggtccatggcgcccaccagggggtagggaacgttggtggcggcgtagatgcgcttctccagggcctccagaaagaccagcttctcgccgatggacaccagatccgcgcgcacgcgcgtcgtctggggggcgctctcgagctcgtccagcgtctgccggttcaggtcgagctgctcctcctgcatctccagcaggtggcggcccacgtcgtccagacttcgcacggccttgcccatcacgagcgccgtgaccaggttggccccgttcaggaccatctcgccgtacgtcaccggcacgtcggcttcggtgtcctccactttcaggaaggactgcaggaggcgctgtttgatcggggctgtggtgactagcaccccgtcgaccggccgcccgcgcgtgtcggcatgcgtcagacggggcacggccacggagggctgcgtggccgtggtgaggtccacgagccaggcctcgacggcctcccggcggtggcccgccttgcccaggaaaaagctcgtctcgcagaagcttcgctttagctcggcgaccagggtcgcccgggccaccctggtggccaggcggccgttgtccaggtatcgttgcatcggcaacaacaaagccaggggcggcgccttttccagcagcacgtgcagcatctggtcggccgtgccgcgctcaaacgccccgaggacggcctggacgttgcgagcgagctgttggatggcgcgcaactggcgatgcgcgctgatacccgtcccgtccagggcctcccccgtgagcagggcgatggcctcggtggccaggctgaaggcggcgttcagggcccggcggtcgataatcttggtcatgtaattgtgtgtgggttgctcgatggggtgcgggccgtcgcgggcaatcagcggctggtggacctcgaactgtacgcgcccctcgttcatgtaggccagctccggaaacttggtacacacgcacgccaccgacaacccgagctccagaaagcgcacgagcgacagggtgttgcaatacgaccccagcagggcgtcgaactcgacgtcgtacaggctgtttgcatcggagcgcacgcgggaaaaaaaatcgaacaggcgtcgatgcgacgccacctcgatcgtgctaaggagggacccggtcggcaccatggccgtggcataccggtatcccggagggtcgcggttgggagcggccatggggtcgcgtggagatcggctgtctctagcgatattggcccggggaggctaagatccaccccaacgcccggccacccgtgtacgtgcccgacggcccaaggtccaccgaaagacacgacggacccggacccaaagaggcgggggatgctgtgtgagaggccgggtgtcggtcgggggggaaaggcaccgggagaaggctgcggcctcgttccaggagaacccagtgtccccaacagacccggggacgtgggatccccggccttatatacccccccccgccccacccccgttagaacgcgacgggtgcattcaagatggccctggtccaaaagcgtgccaggaagaaattggcagaggcggcaaagctgtccgccgccgccacccacatcgaggccccggccgcacaggctatccccagggcccgtgtgcgcaggggatcggtgggtggcagcatttggttggtggcgataaagtggaaaagcccgtccggactgaaggtctcgtgggcggcggcgaacaaggcacacagggccgtgcctcccaaaaacacggacatcccccaaaacacgggcgccgacaacggcagacgatccctcttgatgttaacgtacaggaggagcgcccgcaccgcccacgtaacgtagtagccgacgatggcggccaggatacaggccggcgccaccacccttccggtcagcccgtaatacatgcccgctgccaccatctccaacggcttcaggaccaaaaacgaccaaaggaacagaatcacgcgctttgaaaagaccggctgggtatggggcggaagacgcgagtatgccgaactgacaaaaaaatcagaggtgccgtacgaggacaatgaaaactgttcctccagcggcagttctccctcctccatggtcatggggtgtgcggtggaggtggggagaccgaaaccgcaaagggtcgcttacgtcagcaggatcccgagatcaaagacacccgggttcttgcacaaacaccacccgggttgcatccgcggaggcgagtgttttgataaggccgttccgcgccttgatataacctttgatgttgaccacaaaacccggaatttacgcctacgccccaatgcccacgcaagatgaggtaggtaacccccccgtgggtgtgacgttgcgtttagttcattggaggccaaggggaaaaatggggtggggaggaaacggaaaacccagtaggccgtgtcgggaacacgcccggggttgtcctcaaaaggcagggtccatactacggaagccgtcgttgtattcgagacctgcctgtgcgacgcacgtcggggttgcctgtgtccggttcggcccccaccgcgtgcggcacgcacgaggacgagtccgcgtgctttattggcgttccaagcgttgccctccagtttctgttgtcggtgttcccccatacccacgcccacatccaccgtagggggcctctgggccgtgttacgtcgccgcccgcgatggagcttagctacgccaccaccatgcactaccgggacgttgtgttttacgtcacaacggaccgaaaccgggcctactttgtgtgcggggggtgtgtttattccgtggggcggccgtgtgcctcgcagcccggggagattgccaagtttggtctggtcgttcgagggacaggcccagacgaccgcgtggtcgccaactatgtacgaagcgaactccgacaacgcggcctgcaggacgtgcgtcccattggggaggacgaggtgtttctggacagcgtgtgtcttctaaacccgaacgtgagctccgagctggatgtgattaacacgaacgacgtggaagtgctggacgaatgtctggccgagtactgcacctcgctgcgaaccagcccgggtgtgctaatatccgggctgcgcgtgcgggcgcaagacagaatcatcgagttgtttgaacacccaacgatagtcaacgtttcctcgcactttgtgtataccccgtccccatacgtgttcgccctggcccaggcgcacctcccccggctcccgagctcgctggaggccctggtgagcggcctgtttgacggcatccccgccccacgccagccacttgacgcccacaacccgcgcacggatgtggttatcacgggccgccgcgccccacgacccatcgccgggtcgggggcggggtcggggggcgcgggcgccaagcgggccaccgtcagcgagttcgtgcaagtcaaacacattgaccgcgtgggccccgctggcgtttcgccggcgcctccgccaaacaacaccgactcgagttccctggtgcccggggcccaggattccgccccgcccggccccacgctaagggagctgtggtgggtgttttatgccgcagaccgggcgctggaggagccccgcgccgactctggcctcacccgcgaggaggtacgtgccgtacgtgggttccgggagcaggcgtggaaactgtttggctccgcgggggccccgcgggcgtttatcggggccgcgttgggcctgagccccctccaaaagctggccgtttactactatatcatccaccgagagaggcgcctgtcccccttccccgcgctagtccggctcgtaggccggtacacacagcgccacggcctgtacgtccctcggcccgacgacccagtcttggccgatgccatcaacgggctggttcgcgacgcgctggcggccggaaccacagccgagcagctcctcatgttcgaccttctccccccaaaggacgtgccggtgggaagcgacgtgcaggccgacagcaccgctctgctgcgctttatagaatcgcaacgtctcgccgtccccgggggggtgatctcccccgagcacgtcgcgtaccttggtgcgttcctgagcgtgctgtacgctggccgcgggcgcatgtccgcagcaacgcacaccgcgcggctgacaggggtgacctccctggtgctagcggtgggtgacgtggaccgtctttccgcgtttgaccgcggagcggcgggcgcggccagccgcacgcgggccgccgggtacctggatgtgcttctgaccgttcgtctcgctcgctccaaacacggacagtctgtgtaacagaccccaataaacgtatgtcgctaccacacccttgtgtgtcaatggacgcctctccgggggggaagggaaaacaaagaggggctgggggagcggcaccactggggcctgaacaaacaaacaaaccacagacacggttacagtttattcggtcgggcggataaacggccgaagccacgccccctttattcgcgtctccaaaaaaacgggacacttgtccggagaacctttaggatgccagccagggcggcggtaatcataaccacgcccagcgcagaggcggccagaaacccgggcgcaattgcggccacgggctgcgtgtcaaaggctagcaaatgaatgacggttccgtttggaaatagcaacaaggccgtggacggcacgtcgctcgaaaacacgctcggggcgccctccgtcggcccggcggcgatttgctgctgtgtgttgtccgtatccaccagcaacacagacatgacctccccggctggggtgtagcgcataaacacggcccccacgagccccaggtcgcgctggttttgggtgcgcaccagccgcttggactcgatatcccgggtggagccttcgcatgtcgcggtgaggtaggttaggaacagtgggcgtcggacgtcgacgccggtgagcttgtagccgatcccccggggcagaggggagtgggtgacgacgtagctggcgttgtgggtgatgggtaccaggatccgtggctcgacgttggcagactgccccccgcaccgatgtgaggcctcagggacgaaggcgcggatcagggcgttgtagtgtgcccagcgcgtcagggtcgaggcgaggccgtgggtctgctgggccaggacttcgaccggggtctcggatcgggtggcttgagccagcgcgtccaggataaacacgctctcgtctagatcaaagcgcagggaggccgcgcatggcgaaaagtggtccggaagccaaaagagggttttctggtggtcggcccgggccagcgcggtccggaggtcggcgttggtcgctgcggcgacgtcggacgtacacagggccgatgctatcagaaggctccggcgggcgcgttcccgctgcaccgccgaggggacgcccgccaagaacggctgccggaggacagccgaggcgtaaaatagcgcccggtggacgaccggggtggtcagcacgcggccccctagaaactcggcatacagggcgtcgatgagatgggctgcgctgggcgccactgcgtcgtacgccgaggggctatccagcacgaaggccagctgatagcccagcgcgtgtaatgccaagctctgttcgcgctccagaatctcggccaccaggtgctggagccgagcctctagctgcaggcgggccgtgggatccaagactgacacattaaaaaacacagaatccgcggcacagcccgcggccccgcgggcggccaacccggcaagcgcgcgcgagtgggccaaaaagcctagcaggtcggagaggcagaccgcgccgtttgcgtgggcggcgttcacgaaagcaaaacccgacgtcgcgagcagccccgttaggcgccagaagagaggggggcgcgggccctgctcggcgcccgcgtcccccgagaaaaactccgcgtatgcccgcgacaggaactgggcgtagttcgtgccctcctccgggtagccgcccacgcggcggagggcgtccagcgcggagccgttgtcggcccgcgtcagggaccctaggacaaagacccgataccgggggccgcccgggggcccgggaagagcccccggggggttttcgtccgcggggtccccgacccgatctagcgtctggcccgcggggaccaccatcacttccaccggagggctgtcgtgcatggatatcacgagccccatgaattcccgcccgtagcgcgcgcgcaccagcgcggcatcgcacccgagcaccagctcccccgtcgtccagatgcccacgggccacgtcgaggccgacggggagaaatacacgtacctacctggggatctcaacaggccccgggtggccaaccaggtcgtggacgcgttgtgcaggtgcgtgatgtccagctccgtcgtcgggtgccgccgggccccaaccggcggtcgggggggcggtgtatcacgcggcccgcttgggtggctcgccgtcgccacgttgtctccccgcgggaacgtcagggcctcggggtcagggacggccgaaaacgttacccaggcccgggaacgcagcaacacggaggcgactggattgtacaagagacccttaaggggggcgaccgaggggggaggctgggcggtcggctcgaccgtggtgggggcgggcaggctcgcgttcgggggccggccgagcaggtaggtcttcgggatgtaaagcagctggccggggtcccgcggaaactcggccgtggtgaccaatacaaaacaaaagcgctcctcgtaccagcgaagaaggggcagagatgccgtagtcaggtttagttcgtccggcggcgccagaaatccgcgcggtggtttttgggggtcgggggtgtttggcagccacagacgcccggtgttcgtgtcgcgccagtacatgcggtccatgcccaggccatccaaaaaccatgggtctgtctgctcagtccagtcgtggacctgaccccacgcaacgcccaaaataataacccccacgaaccataaaccattccccatgggggaccccgtccctaacccacggggcccgtggctatggcagggcttgccgccccgacgttggctgcgagccctgggccttcacccgaacttggggggtggggtggggaaaaggaagaaacgcgggcgtattggccccaatggggtctcggtggggtatcgacagagtgccagccctgggaccgaaccccgcgtttatgaacaaacgacccaacacccgtgcgttttattctgtctttttattgccgtcatagcgcgggttccttccggtattgtctccttccgtgtttcagttagcctcccccatctcccgggcaaacgtgcgcgccaggtcgcagatcgtcggtatggagccgggggtggtgacgtgggtctggaccatcccggaggtaagttgcagcagggcgtcccggcagccggcgggcgattggtcgtaatccaggataaagacgtgcatgggacggaggcgtttggccaagacgtccaaggcccaggcaaacacgttgtacaggtcgccgttgggggccagcaactcgggggcccgaaacagggtaaataacgtgtccccgatatggggtcgtgggcccgcgttgctctggggctcggcaccctggggcggcacggccgtccccgaaagctgtccccaatcctcccgccacgacccgccgccctgcagataccgcaccgtattggcaagcagcccgtaaacgcggcgaatcgcggccagcatagccaggtcaagccgctcgccggggcgctggcgtttggccaggcggtcgatgtgtctgtcctccggaagggcccccaacacgatgtttgtgccgggcaaggtcggcgggatgagggccacgaacgccagcacggcctggggggtcatgctgcccataaggtatcgcgcggccgggtagcacaggagggcggcgatgggatggcggtcgaagatgagggtgagggccgggggcggggcatgtgagctcccagcctcccccccgatatgaggagccagaacggcgtcggtcacggcataaggcatgcccattgttatctgggcgcttgtcattaccaccgccgcgtccccggccgatatctcaccctggtcgaggcggtgttgtgtggtgtagatgttcgcgattgtctcggaagcccccagcacctgccagtaagtcatcggctcgggtacgtagacgatatcgtcgcgcgaacccagggccaccagcagttgcgtggtggtggttttccccatcccgtgaggaccctctatataaacccgcagtagcgtgggcattttctgctccaggcggacttccgtggcttcttgctgccggcgagggcgcaacgccgtacgtcggttgctatggccgcgagaacgcgcagcctggtcgaacgcagacgcgtattgatggcaggggtacgaagccatacgcgcttctacaaggcgcttgccgaagaggtgcgggagtttcacgccaccaagatctgcggcacgctgttgacgctgttaagcgggtcgctgcagggtcgctcggtgttcgaggccacacgcgtcaccttaatatgcgaagtggacctgggaccgcgccgccccgactgcatctgcgtgttcgaattcgtgaatgacaagacgctgggcggggtttgtgtcatcatagaactaaagacatgcaaatatatttcttccggggacaccgccagcaaacgcgagcaacgggccacggggatgaagcagctgcgccactccctgaagctcctgcagtccctcgcgcctccgggtgacaagatagtgtacctgtgccccgtcctggtgtttgtcgcccaacggacgctccgcgtcagccgcgtgacccggctcgtcccgcagaaggtctccggtaatatcaccgcagtcgtgcggatgctccagagcctgtccacgtatacggtccccatggagcctaggacccagcgagcccgtcgccgccgcggcggcgccgcccgggggtctgcgagcagaccgaaaaggtcacactctggggcgcgcgacccgcccgagtcagcggcccgccagttaccacccgccgaccaaacccccgcctccacggagggcgggggggtgcttaagaggatcgcggcgctcttctgcgtgcccgtggccaccaagaccaaaccccgagccgcctccgaatgagagtgtttcgttccttccccctccccccgcgtcagacaaaccctaaccaccgcttaagcggcccccgcgaggtccgaagactcatttggatccggcgggagccacccgacaacagcccccgggttttcccacgccagacgccggtccgctgtgccatcgcgccccctcatcccaccccccatcttgtccccaaataaaacaaggtctggtagttaggacaacgaccgcagttctcgtgtgttattttcgctctccgcctctcgcagatggacccgtactgcccatttgacgctctggacgtctgggaacacaggcgcttcatagtcgccgattcccgaaacttcatcacccccgagttcccccgggacttttggatgtcgcccgtctttaacctcccccgggagacggcggcggagcaggtggtcgtcctacaggcccagcgcacagcggctgccgctgccctggagaacgccgccatgcaggcggccgagctccccgtcgatatcgagcgccggttacgcccgatcgaacggaacgtgcacaagatcgcaggcgccctggaggcgctggagacggcggcggccgccgccgaagaggcggatgccgcgcgcggggatgagccggcgggtgggggcgacgggggggcgcccccgagtctggccgtcgcggagatggaggtccagatcgtgcgcaacgacccgccgctacgatacgacaccaacctccccgtggatctgctacacatggtgtacgcgggccgcggggcgaccggatcgtcgggggtggtgttcgggacctggtaccgcactatccaggaccgcaccatcacggactttcccctgaccacccgcagtgccgactttcgggacggccgtatgtccaagaccttcatgacggcgctggtactgtccctgcagtcgtgcggccggctgtatgtgggccagcgccactattccgccttcgagtgcgccgtgttgtgtctctacctgctgtaccgaaacacgcacggggccgccgacgatagcgaccgcgctccggtcacgttcggggatctgctgggccggctgccccgctacctggcgtgcctggccgcggtgatcgggaccgagggcggccggccacagtaccgctaccgcgacgacaagctccccaagacgcagttcgcggccggcgggggccgctacgaacacggagcgctggcgtcgcacatcgtgatcgccacgctgatgcaccacggggtgctcccggcggccccgggggacgtcccccgggacgcgagcacccacgttaaccccgacggcgtggcgcaccacgacgacataaaccgcgccgccgccgcgttcctcagccggggccacaacctattcctgtgggaggaccagactctgctgcgggcaaccgcgaacaccataacggccctgggcgttatccagcggctcctcgcgaacggcaacgtgtacgcggaccgcctcaacaaccgcctgcagctgggcatgctgatccccggagccgtcccttcggaggccatcgcccgtggggcctccgggtccgactcgggggccatcaagagcggagacaacaatctggaggcgctatgtgccaattacgtgcttccgctgtaccgggccgacccggcggtcgagctgacccagctgtttcccggcctggccgccctgtgtcttgacgcccaggcggggcggccggtcgggtcgacgcggcgggtggtggatatgtcatcgggggcccgccaggcggcgctggtgcgcctcaccgccctggaactcatcaaccgcacccgcacaaaccccacccccgtgggggaggttatccacgcccacgacgccctggcgatccaatacgaacaggggcttggcctgctggcgcagcaggcacgcattggcttgggctccaacaccaagcgtttctccgcgttcaacgttagcagcgactacgacatgttgtactttttatgtctggggttcattccacagtacctgtcggcggtttagtgggtggtgggcgaggggggagggggcattagggagaaagaacaagagcctccgttgggttttctttgtgcctgtactcaaaaggtcataccccgtaaacggcgggctccagtcccggcccggcggttggcgtgaacgcaacggcgggagctgggttagcgtttagtttagcattcgctctcgcctttccgcccgccccccgaccgttgcgccttttttttttttcgtccaccaaagtctctgtgggtgcgcgcatggcagccgatgccccgggagaccggatggaggagcccctgccagacagggccgtgcccatttacgtggctgggtttttggccctgtatgacagcggggactcgggcgagttggcattggatccggatacggtgcgtgcggccctgcctccggataacccactcccgattaacgtggaccaccgcgctggctgcgaggtggggcgggtgctggccgtggtcgacgacccccgcgggccgttttttgtgggactgatcgcctgcgtgcaactggagcgcgtcctcgagacggccgccagcgctgcgattttcgagcgccgcgggccgccgctctcccgggaggagcgcctgttgtacctgatcaccaactacctgccctcggtctccctggccacaaaacgcctggggggcgaggcgcaccccgatcgcacgctgttcgcgcacgtcgcgctgtgcgcgatcgggcggcgcctcggcactatcgtcacctacgacaccggtctcgacgccgccatcgcgccctttcgccacctgtcgccggcgtctcgcgagggggcgcggcgactggccgccgaggccgagctcgcgctgtccggacgcacctgggcgcccggcgtggaggcgctgacccacacgctgctttccaccgccgttaacaacatgatgctgcgggaccgctggagcctggtggccgagcggcggcggcaggccgggatcgccggacacacctacctccaggcgagcgaaaaattcaaaatgtggggggcggagcctgtttccgcgccggcgcgcgggtataagaacggggccccggagtccacggacataccgcccggctcgatcgctgccgcgccgcagggtgaccggtgcccaatcgtccgtcagcgcggggtcgcctcgcccccggtactgccccccatgaaccccgttccggcatcgggcaccccggcccccgcgccgcccggcgacgggagctacctgtggatcccggcctcccattacaaccagctcgtcgccggccacgccgcgccccaaccccagccgcattccgcgtttggtttcccggctgcggcgggggccgtggcctatgggcctcacggcgcgggtctttcccagcattaccctccccacgtcgcccatcagtatcccggggtgctgttctcgggacccagcccactcgaggcgcagatagccgcgttggtgggggccatagccgcggaccgccaggcgggcggtcagacggccgcgggagaccctggggtccgggggtcgggaaagcgtcgccggtacgaggcggggccgtcggagtcctactgcgaccaggacgaaccggacgcggactacccgtactaccccggggaggctcgaggcgggccgcgcggggtcgactctcggcgcgcggcccgccagtctcccgggaccaacgagaccatcacggcgctgatgggggcggtgacgtctctgcagcaggaactggcgcacatgcgggctcggaccagcgccccctatggaatgtacacgccggtggcgcactatcgccctcaggtgggggagccggaaccaacaacgacccacccggccctttgtcccccggaggccgtgtatcgccccccaccacacagcgccccctacggtcctccccagggtccggcgtcccatgcccccactcccccgtatgccccagctgcctgcccgccaggcccgccaccgcccccatgtccttccacccagacgcgcgcccctctaccgacggagcccgcgttcccccccgccgccaccggatcccaaccggaggcatccaacgcggaggccggggcccttgtcaacgccagcagcgcagcacacgtggacgttgacacggcccgcgccgccgatttgttcgtctctcagatgatgggggcccgctgattcgccccggtctttggtaccatgggatgtcttactgtatatctttttaaataaaccaggtaataccaaataagacccattggtgtatgttctttttttattgggaggcgcgggtaggcgggtagctttacaatgcaaaagccttcgacgtggaggaaggcgtggggggggaatcggcactgaccaagggggtccgttttgtcacgggaaaggaaagaggaaacaggccgcggacacccgggggagtttatgtgttcccttttctttcttcccacacacacaaaaggcgtaccaaacaaacaaaccaaaagatgcacatgcggtttaacacccgtggtttttatttacaacaaaccccccgtcacaggtcgtcctcgtcggcgtcaccgtctttgttgggaacttgggtgtagttggtgttgcggcgcttgcgcatgaccatgtcggtgaccttggcgctgagcagcgcgctcgtgcccttcttcttggccttgtgttccgtgcgctccatggcagacaccagggccatgtaccgtatcatctcccgggcctcggctagcttggcctcgtcaaagtcgccgccctcctcgccctccccggacgcgtccgggttggtggggttcttgagctccttggtggttagcgggtacagggccttcatggggttgctctgcagccgcatgacgtagcgaaaggcgaagaaagccgccgccaggccggccaggaccaacagacccacggccagcgccccaaaggggttggacatgaaggaggacacgcccgacacggccgataccacgccgcccacgatgcccatcaccaccttgccgaccgcgcgccccaggtcgcccatcccctcgaagaacgcgcccaggcccgcgaacatggcggcgttggcgtcggcgtggatgaccgtgtcgatgtcggcgaagcgcaggtcgtgcagctggttgcggcgctggacctccgtgtagtccagcaggccgctgtccttgatctcgtgtcgggtgtacacctccagggggacaaactcgtgatcctccagcatggtgatgttgaggtcgatgaaggtgctgacggtggtgatgtcggcgcggctcagctggtgggagtacgcgtactcctcgaagtacacgtagcccccgccgaaggtgaagtagcgccggtgtcccacggtgcacggctcgatcgcatcgcgcgtcagccgcagctcgttgttctcccccagctgcccctcgaccaacgggccctggtcttcgtaccgaaagctgaccagggggcggctgtagcaggccccgggccgcgagctgatgcgcatcgagttttggacgatcacgttgtccgcggcgaccggcacgcacgtggagacggccatcacgtcgccgagcatccgcgcgctcacccgccggcccacggtggccgaggcgatggcgttggggttcagcttgcgggcctcgttccacagggtcagctcgtgattctgcagctcgcaccacgcgatggcaacgcggcccaacatatcgttgacatggcgctgtatgtggttgtacgtaaactgcagccgggcgaactcgatggaggaggtggtcttgatgcgctccacggacgcgttggcgctggccccgggcggcgggggcgtggggtttgggggcttgcggctctgctctcggaggtgttcccgcacgtacagctccgcgagcgtgttgctgagaaggggctggtacgcgatcagaaagcccccattggccaggtagtactgcggctggcccaccttgatgtgcgtcgcgttgtacctgcgggcgaagatgcggtccatggcgtcgcgggcgtccttgccgatgcagtcccccaggtccacgcgcgagagcgggtactcggtcaggttggtggtgaaggtggtggatatggcgtcggaggagaatcggaaggagccgccgtactcggagcgcagcatctcgtccacctcctgccacttggtcatggtgcagaccgacgggcgctttggcacccagtcccaggccacggtgaacttgggggtcgtgagcaggttccgggtggtcggcgccgtggcccgggccttggtggtgaggtcgcgcgcgtagaagccgtcaacctgcttgaagcggtcggcggcgtagctggtgtgttcggtgtgcgacccctcccggtagccgtaaaacggggacatgtacacaaagtcgccagtcgccagcacaaactcgtcgtacgggtacaccgagcgcgcgtccacctcctcgacgatgcagtttaccgtcgtcccgtaccggtggaacgcctccacccgcgaggggttgtacttgaggtcggtggtgtgccagccccggctcgtgcgggtcgcggcgttggccggtttcagctccatgtcggtctcgtggtcgtcccggtgaaacgcggtggtctccaggttgttgcgcacgtacttggccgtggaccgacagacccccttggcgttgatcttgtcgatcacctcctcgaaggggacgggggcgcggtcctcaaagatccccataaactgggagtagcggtggccgaaccacacctgcgaaacggtgacgtctttgtagtacatggtggccttgaacttgtacggggcgatgttctccttgaagaccaccgcgatgccctccgtgtagttctgaccctcgggccgggtcgggcagcggcgcggctgctcgaactgcaccaccgtggcgcccgtggggggtgggcacacgtaaaagtttgcatcggtgttctccgccttgatgtcccgcaggtgctcgcgcagggtggcgtggcccgcggcgacggtcgcgttgtcgccggcggggcgcggcggcggtgggtttttcggttttttgttcttcttcggtttcgtgtcccccgttggggcggggccaggggcgggcggcgccggagtggcaggtcccccgttcgccgcctgggtcgcggccgcgaccccaggcgtgccgggggaactcggagccgccgacgccaccaggacccccagcgtcaaccccaagagcgcccatacgacgaaccaccggcacccccgcgcgggggcgccctggcgcatggcgggactacgggggcccgtcgtgccccccgtcaggtagcctgggggcgaggtgctggaggaccgagtagaggatcgagaaaacgtctcggtcgtagaccacgaccgaccgggggccgatacagccgtcgggggcgctctcgacgatggccaccagcggacagtcggagtcgtacgtgagatatacgccgggcgggtaacggtaacgaccttcggaggtcgggcggctgcagtccgggcggcgcaactcgagctccccgcaccggtagaccgaggcaaagagtgtggtggcgataatcagctcgcgaatatatcgccaggcggcgcgctgagtgggcgttattccggaaatgccgtcaaaacagtaaaacctctgaaattcgctgacggcccaatcagcacccgagccccccgcccccatgatgaaccgggcgagctcctccttcaggtgcggcaggagccccacgttctcgacgctgtaatacagcgcggtgttggggggctgggcgaagctgtgggtggagtgatcaaagaggggcccgttgacgagctcgaagaagcgatgggtgatgctggggagcagggccgggtccacctggtgtcgcaggagagacgctcgcatgaaccggtgcgcgtcgaacacgcccggcgccgagcggttgtcgatgaccgtgcccgcgcccgccgtcagggcgcagaagcgcgcgcgcgccgcaaagccgttggcgaccgcggcgaacgtcgcgggcagcacctcgccgtggacgctgacccgcagcatcttctcgagctccccgcgctgctcgcggacgcagcgccccaggctggccaacgaccgcttcgtcaggcggtccgcgtacagccgccgtcgctcccgcacgtccgcggccgcttgcgtggcgatgtccccccacgtctcgggcccctgccccccgggcccgcggcgacggtcttcgtcctcgcccccgcccccgggagctcccaacccccgtgccccttcctctacggcgacacggtccccgtcgtcgtcggggcccgcgccgcccttgggcgcgtccgccgcgccccccgcccccatgcgcgccagcacgcgacgcagcgcctcctcgtcgcactgttcggggctgacgaggcgccgcaagagcggcgtcgtcaggtggtggtcgtagcacgcgcggatgagcgcctcgatctgatcgtcgggtgacgtggcctgaccgccgattattagggcgtccaccatatccagcgccgccaggtggctcccgaacgcgcgatcgaaatgctccgcccgccgcccgaacagcgccagttccacggccaccgcggcggtctcctgctgcaactcgcgccgcgccagcgcggtcaggttgctggcaaacgcgtccatggtggtctggccggcgcggtcgccggacgcgagccagaatcgcaattcgctgatggcgtacaggccgggcgtggtggcctgaaacacgtcgtgcgcctccagcagggcgtcggcctccttgcggaccgagtcgttctcgggcgacgggtggggctgcccgtcgccccccgcggtccgggccagcgcatggtccaacacggagagcgcccgcgcgcggtcggcgtccgacagcccggcggcgtggggcaggtaccgccgcagctcgttggcgtccagccgcacctgcgcctgctgggtgacgtggttacagatacggtccgccaggcggcgggcgatcgtcgccccctggttcgccgtcacacacagttcctcgaaacagaccgcgcaggggtgggacgggtcgctaagctccggggggacgataaggcccgaccccaccgcccccaccataaactcccgaacgcgctccagcgcggcggtggcgccgcgcgagggggtgatgaggtggcagtagtttagctgctttagaaagttctcgacgtcgtgcaggaaacacagctccatatggacggtcccgccatacgtatccagcctgacccgttggtgatacggacagggtcgggccaggcccatggtctccgtgaaaaacaccgcgacgtctcccgcggtcgcgaacgtctccaggctgcccaggagccgctcgccctcgcgccacgcgtactctagcagcaactccagggtgaccgacagcggggtgagaaaggccccggcctgggcctccaggcccggcctcagacgacgccgcagcgcccgcacctgaagcgcgttcagcttcagttgggggagcttcccccgtccgatgtgggggtcgcaccgccggagcagctctatctgaaacacataggtctgcacctgtccgagcagggctaacaacttttgacgggccacggtgggctcggacaccggggcggccatctcgcggcgccgatctgtaccgcggccggagtatgcggtggaccgaggcggtccgtacgctacccggcgtctggctgagccccggggtccccctattcggggcggcctcccgcgggcccgccgaccggcaagccgggagtcggcggcgcgtgcgtttctgttctattcccagacaccgcggagaggaatcacggcccgcccagagatatagacacggaacacaaacaagcacggatgtcgtagcaataatttattttacacacattccccgccccgccctaggttcccccaccccccaacccctcacagcatatccaacgtcaggtctccctttttgtcggggggcccctccccaaacgggtcatccccgtggaacgcccgtttgcggccggcaaatgccggtcccggggcccccgggccgccgaacggcgtcgcgttgtcgtcctcgcagccaaaatccccaaagttaaacacctccccggcgttgccgagttggctgactagggcctcggcctcgtgcgccacctccagggccgcgtccgtcgaccactcgccgttgccgcgctccagggcacgtgcggtcagctccatcatctcctcgcttaggtactcgtcctccaggagcgccagccagtcctcgatctgcagctgttgggtgcggggccccaggcttttcacggtcgccacgaacacgctactggcgacggccgccccgccctcggagataatgccccggagctgctcgcacagcgagctttcgtgcgctccgccgccgaggctcgaggccgcgcacacaaacccggcccggggacaggccaggacgaacttgcgggtgcggtcaaaaataaggagcgggcacgcgtttttgccgcccatcaggctggcccagttcccggcctgaaacacacggtcgttgccggccatgccgtagtatttgctgatgctcaaccccaacacgaccatggggcgtgccgccatgacgggccgcagcaggttgcagctggcgaacatggaggtccacgcgcccggatgcgcgtccacggcgtccatcagcgcgcgggccccggcctccaggcccgccccgccctgcgcggaccacgcggccgccgcctgcacgctggggggacggcgggaccccgcgatgatggccgtgagggtgttgatgaagtacgtcgagtgatcgcagtaccgcagaatctggtttgccatgtagtacatcgccagctcgctcacgttgttgggggccaggttaataaagttgatcgcgccgtagtccagggaaaactttttaatgaacgcgatggtctcgatgtcctcgcgcgacaggagccgggcgggaagctggttgcgttggagggccgtccagaaccactgcgggttcggctggttggaccccgggggcttgccgttggggaagatggccgcgtggaactgcttcagcagaaagcccagcggtccgaggaggatgtccacgcgcttgtcgggcttctggtaggcgctctggaggctggcgacccgcgccttggcggcctcggacgcgttggcgctcgcgcccgcgaacaacacgcggctcttgacgcgcagctccttgggaaaccccagggtcacgcgggcaacgtcgccctcgaagctgctctcggcgggggccgtctggccggccgtcaggctgggggcgcagatagccgcaccctccgagagcgcgaccgtcagcgttttggccgacagaaacccgttgttaaacatgtccatcacgcgccgccgcagcaccggttggaattgattgcgaaagttgcgcccctcgaccgactgcccggcgaacaccccgtggcactggctcagggccaggtcctggtacacggcgaggttggatcgccgcccgagaagctgaagcagggggcacggcccgcacgcgtacgggtccagcgtcagggacatggcgtggttggcctcgcccagaccgtcgcgaaacttgaagttcctcccctccaccaggttgcgcatcagctgctccacctcgcggtccacgacctgcctgacgttgttcaccaccgtatgcagggcctcgcggttggtgatgatggtctccagccgccccatggccgtggggaccgcctggtccacgtactgcagggtctcgagttcggccatgacgcgctcggtcgccgcgcggtacgtctcctgcatgatggtccgggcggtctcggatccgtccgcgcgcttcagggccgagaaggcggcgtagtttcccagcacgtcgcagtcgctgtacatgctgttcatggtcccgaagacgccgatggctccgcgggcggcgctggcgaacttgggatggcgcgcccggaggcgcatgagcgtcgtgtgtacgcaggcgtggcgcgtgtcgaaggtgcacaggttacagggcacgtcggtctggttggagtccgcgacgtatcgaaacacgtccatctcctggcgcccgacgatcacgccgccgtcgcagcgctccaggtaaaacagcatcttggccagcagcgccggggaaaacccacacagcatggccaggtgctcgccggcaaattcctgggttccgccgacgaggggcgcggtgggccgaccctcgaacccgggcaccacgtgtccctcgcggtccacctgtgggttggccgccacgtgggtcccgggcacgaggaagaagcggtaaaaggagggtttgctgtggtcctttgggtccgccgggccggcgtcgtccacctcggtgagatggagggccgagttggtgctaaataccatggcccccacgagtcccgcggcgcgcgccaggtacgccccgacggcgttggcgcgggccgcggccgtgtcctggccctcgaacagcggccacgcggagatgtcggtgggcggctcgtcaaagacggccatcgacacgatagactcgagggccagggcggcgtctccggccatgacggaggccaggcgctgttcgaacccgcccgcagggcccttgccgccgccgtcgcgcccgccccgcggggtcttaccctggctggcttcgaaggccgtgaacgtaatgtcggcggggagggcggcgccctcgtggttttcgtcaaacgccaggtgggcggccgcgcgggccacggcgtccacgtttcggcatcgcagtgccacggcggcgggtcccacgaccgcctcgaacaggaggcggtggagggggcggttaaaaaacggaagcgggtaggtaaaattctccccgatcgatcggtggttggcgttgaacggctctgcgatgacacggctaaaatccggcatgaacagctgcaacgggtacacgggtatgcggtgcacctccgccccgcctatggttaccttgtccgagcctcccaggtgcagaaaggtgttgttgatgcacacggcctccttgaagccctcggtaacgaccagatacaggagggcgcggtccgggtccaggccgaggcgctcacacagcgcctcccccgtcgtctcgtgtttgaggtcgccgggccggggggtgtagtccgaaaagccaaaatggcggcgtgcccgctcgcagagtcgcgtcaggttcggggcctgggtgctggggtccaggtgccggccgccgtgaaagacgtacacggacgagctgtagtgcgagggcgtcagtttcagggacaccgcggtacccccgagccccgtcgtgcgagaacccacgaccacggccacgttggcctcaaagccgctctccacggtcaggcccacgaccaggggcgccacggcgacgtcggcatcgccgctgcgcgccgacagtaacgccagaagctcgatgccttcggacggacacgcgcgagcgtacacgtatcccaggggcccgggggggaccttgatggtggttgccgtcttgggctttgtctccatgtccttctgtcaatcggtccgcgaacggaggtaatcccggcacgacgacggacgcccgacaaggtatgtctcccgagcgtcaaaatccgggggggggggcggcgacggtcaaggggagggttggagaccggggttggggaatgaatccctacccttcaccgacaaccccccgggtaatcacggggtgccgatgaaccccggcggccggcaacgcggggtccctgcgagaggcacagatgcttacggtcaggtgctccgggtcgggtgcgtctggtatgcggttggtatatgtacactttacctgggggcgtgcctggccgccccagcccctcccacgccctgcgcgtcatcagccggtgggcgtggccgctattataaaaaaagtgagaacgcgaagcgttcgcactttgtcctaataatatatatattattaggacaaagtgcgaacgcttcgcgttctcactttttttataatagcggccacgcccaccggctacgtcacgctcctgtcggccgccggcggtccataagcccggccggccgggccgacgcgaataaaccgggccgccggccggggcgccgcgcagcagctcgccgcccggatccgccagacaaacaaggcccttgcacatgccggcccgggcgagcctgggggtccggtaattttgccatcccacccaagcggctttttgggtttttctcttcccccctccccacatcccccctctttaggggttcgggtggtaacaaccgcgatgttttccggtggcggcggcccgctgtcccccggaggaaagtcggcggccagggcggcgtccgggttttttgcgcccgccggccctcgcggagccggccggggacccccgccttgcttgaggcaaaacttttacaacccctacctcgccccagtcgggacgcaacagaagccgaccgggccaacccagcgccatacgtactatagcgaatgcgatgaatttcgattcatcgccccgcgggtgctggacgaggatgcccccccggagaagcgcgccggggtgcacgacggtcacctcaagcgcgcccccaaggtgtactgcgggggggacgagcgcgacgtcctccgcgtcgggtcgggcggcttctggccgcggcgctcgcgcctgtggggcggcgtggaccacgccccggcggggttcaaccccaccgtcaccgtctttcacgtgtacgacatcctggagaacgtggagcacgcgtacggcatgcgcgcggcccagttccacgcgcggtttatggacgccatcacaccgacggggaccgtcatcacgctcctgggcctgactccggaaggccaccgggtggccgttcacgtttacggcacgcggcagtacttttacatgaacaaggaggaggtcgacaggcacctacaatgccgcgccccacgagatctctgcgagcgcatggccgcggccctgcgcgagtccccgggcgcgtcgttccgcggcatttccgcggaccacttcgaggcggaggtggtggagcgcaccgacgtgtactactacgagacgcgccccgctctgttttaccgcgtctacgtccgaagcgggcgcgtgctgtcgtacctgtgcgacaacttctgcccggccatcaagaagtacgagggtggggtcgacgccaccacccggttcatcctggacaaccccgggttcgtcaccttcggctggtaccgtctcaaaccgggccggaacaacacgctagcccagccgcgggccccgatggccttcgggacatccagcgacgtcgagtttaactgtacggcggacaacctggccatcgaggggggcatgagcgacctaccggcatacaagctcatgtgcttcgatatcgaatgcaaggcggggggggaggacgagctggcctttccggtggccgggcacccggaggacctggtcatccagatatcctgtctgctctacgacctgtccaccaccgccctggagcacgtcctcctgttttcgctcggttcctgcgacctccccgaatcccacctgaacgagctggcggccaggggcctgcccacgcccgtggttctggaattcgacagcgaattcgagatgctgttggccttcatgacccttgtgaaacagtacggccccgagttcgtgaccgggtacaacatcatcaacttcgactggcccttcttgctggccaagctgacggacatttacaaggtccccctggacgggtacggccgcatgaacggccggggcgtgtttcgcgtgtgggacataggccagagccacttccagaagcgcagcaagataaaggtgaacggcatggtgaacatcgacatgtacgggattataaccgacaagatcaagctctcgagctacaagctcaacgccgtggccgaagccgtcctgaaggacaagaagaaggacctgagctatcgcgacatccccgcctactacgccgccgggcccgcgcaacgcggggtgatcggcgagtactgcatacaggattccctgctggtgggccagctgttttttaagtttttgccccatctggagctctcggccgtcgcgcgcttggcgggtattaacatcacccgcaccatctacgacggccagcagatccgcgtctttacgtgcctgctgcgcctggccgaccagaagggctttattctgccggacacccaggggcgatttaggggcgccgggggggaggcgcccaagcgtccggccgcagcccgggaggacgaggagcggccagaggaggagggggaggacgaggacgaacgcgaggagggcgggggcgagcgggagccggagggcgcgcgggagaccgccggccggcacgtggggtaccagggggccagggtccttgaccccacttccgggtttcatgtgaaccccgtggtggtgttcgactttgccagcctgtaccccagcatcatccaggcccacaacctgtgcttcagcacgctctccctgagggccgacgcagtggcgcacctggaggcgggcaaggactacctggagatcgaggtgggggggcgacggctgttcttcgtcaaggctcacgtgcgagagagcctcctcagcatcctcctgcgggactggctcgccatgcgaaagcagatccgctcgcggattccccagagcagccccgaggaggccgtgctcctggacaagcagcaggccgccatcaaggtcgtgtgtaactcggtttacgggttcacgggagtgcagcacggactcctgccgtgcctgcacgttgccgcgacggtgacgaccatcggccgcgagatgctgctcgcgacccgcgagtacgtccacgcgcgctgggcggccttcgaacagctcctggccgatttcccggaggcggccgacatgcgcgcccccgggccctattccatgcgcatcatctacggggacacggactccatctttgtgctgtgccgcggcctcacggccgccgggctgacggccgtgggcgacaagatggcgagccacatctcgcgcgcgctgtttctgtcccccatcaaactcgagtgcgaaaagacgttcaccaagctgctgctgatcgccaagaaaaagtacatcggcgtcatctacgggggtaagatgctcatcaagggcgtggatctggtgcgcaaaaacaactgcgcgtttatcaaccgcacctccagggccctggtcgacctgctgttttacgacgataccgtatccggagcggccgccgcgttagccgagcgccccgcagaggagtggctggcgcgacccctgcccgagggactgcaggcgttcggggccgtcctcgtagacgcccatcggcgcatcaccgacccggagagggacatccaggactttgtcctcaccgccgaactgagcagacacccgcgcgcgtacaccaacaagcgcctggcccacctgacggtgtattacaagctcatggcccgccgcgcgcaggtcccgtccatcaaggaccggatcccgtacgtgatcgtggcccagacccgcgaggtagaggagacggtcgcgcggctggccgccctccgcgagctcgacgccgccgccccaggggacgagcccgccccccccgcggccctgccctccccggccaagcgcccccgggagacgccgttgcatgccgaccccccgggaggcgcgtccaagccccgcaagctgctggtgtccgagctggccgaggatcccgcatacgccattgcccacggcgtcgccctgaacacggactattacttctcccacctgttgggggcggcgtgcgtgacattcaaggccctgtttgggaataacgccaagatcaccgagagtctgttaaaaaggtttattcccgaagtgtggcaccccccggacgacgtggccgcgcggctccgggccgcagggttcggggcggtgggtgccggcgctacggcggaggaaactcgtcgaatgttgcatagagcctttgatactctagcatgagccccccgtcgaagctgatgtccctcattttacaataaatgtctgcggccgacacggtcggaatctccgcgtccgtgggtttctctgcgttgcgccggaccacgagcacaaacgtgctctgccacacgtgggcgacgaaccggtaccccgggcacgcggtgagcatccggtctatgagccggtagtgcaggtgggcggacgtgccgggaaagatgacgtacagcatgtggcccccgtaagtggggtccgggtaaaacaacagccgcgggtcgcacgccccgcctccgcgcaggatcgtgtggacgaaaaaaagctcgggttggccaagaatcccggccaagaggtcctggaggggggcgttgtggcggtcggccaacacgaccaaggaggccaggaaggcgcgatgctcgaatatcgtgttgatctgctgcacgaaggccaggattagggcctcgcggctggtggcggcgaaccgcccgtctcccgcgttgcacgcgggacagcaacccccgatgcctaggtagtagcccatcccggagagggtcaggcagttgtcggccacggtctggtccagacagaagggcagcgagacgggagtggtcttcaccaggggcaccgagagcgagcgcacgatggcgatctcctcggagggcgtctgggcgagggcggcgaaaaggccccgatagcgctggcgctcgtgtaaacacagctcctgtttgcgggcgtgaggcggcaggctcttccgggaggcccgacgcaccacgcccagagtcccgccggccgcagaggagcgcgaccgccggcgctccttgccgtgatagggcccgggccgggagccgcggcgatgggggtcggtgtcatacataggtacacagggtgtgctccagggacaggagcgagatcgagtggcgtctaagcagcgcgcccgcctcacggacaaatgtggcgagcgcggtgggctttggtacaaatacctgatacgtcttgaaggtgtagatgagggcacgcaacgctatgcagacacgcccctcgaactcgttcccgcaggccagcttggccttgtggagcagcagctcgtcgggatgggtggcggggggatggccgaacagaacccaggggtcaacctccatctccgtaatggcgcacatggggtcacagaacatgtgcttaaagatggcctcgggccccgcggcccgaagcaggctcacaaaccggcccccgtccccgggctgcgtctcggggtcagcctcgagctggtcgacgacgggtacgatacagtcgaagaggctcgtgttgttttccgagtagcggaccacggaggcccggagtctgcgcagggccagccagtaagcacgcaccagtaacaggttacacagcaggcattctccgccggtgcgcccgcgcccccggccgtgtttcagcacggtggccatcagagggcccaggtcgaggtcgggctgggcatcgggttcggtaaactgcgcaaagcgcggagccacgtcgcgcgtgcgtgccccgcgatgcgcttcccaggactggcggaccgtggcgcgacgggcctccgcggcagcgcgcagctggggccccgactcccagacggcgggggtgccggcgaggagcagcaggaccagatccgcgtacgcccacgtatccggcgactcctccggctcgcggtccccggcgaccgtctcgaattccccgttgcgagcggcggcgcgcgtacagcagctgtccccgcccccgcgccgaccctccgtgcagtccaggagacgggcgcaatccttccagttcatcagcgcggtggtgagcgacggctgcgtgccggatcccgccgaccccgccccctcctcgcccccggaggccaaggttccgatgagggcccgggtggcagactgcgccaggaacgagtagttggagtactgcaccttggcggctcccggggagggcgagggcttgggttgcttctgggcatgccgcccgggcaccccgccgtcggtacggaagcagcagtggagaaaaaagtgccggtggatgtcgtttatggtgagggcaaagcgtgcgaaggagccgaccagggtcgccttcttggtgcgcagaaagtggcggtccatgacgtacacaaactcgaacgcggccacgaagatgctagcggcgcagtggggcgcccccaggcatttggcacagagaaacgcgtaatcggccacccactgaggcgagaggcggtaggtttgcttgtacagctcgatggtgcggcagaccagacagggccggtccagcgcgaaggtgtcgatggccgccgcggaaaagggcccggtgtccaaaagcccctccccacagggatccgggggcgggttgcggggtcctccgcgcccgcccgaaccccctccgtcgcccgcccccccgcgggcccttgagggggcggtgaccacgtcggcggcgacgtcctcgtcgagcgtaccgacgggcggcacacctatcacgtgactggccgtcaggagctcggcgcagagagcctcgttaagagccaggaggctgggatcgaaggccacatacgcgcgctcgaacgcccccgccttccagctgctgccgggggactcttcgcacaccgcgacgctcgccaggaccccggggggcgaagttgccatggctgggcgggaggggcgcacgcgccagcgaactttacgggacacaatccccgactgcgcgctgcggtcccagaccctggagagtctagacgcgcgctacgtctcgcgagacggcgcgcatgacgcggccgtctggttcgaggatatgacccccgccgagctggaggttgtcttcccgactacggacgccaagctgaactacctgtcgcggacgcagcggctggcctccctcctgacgtacgccgggcctataaaagcgcccgacgacgccgccgccccgcagaccccggacaccgcgtgtgtgcacggcgagctgctcgcccgcaagcgggaaagattcgcggcggtcattaaccggttcctggacctgcaccagattctgcggggctgacgcgcgtgctgttgggcgggacggttcgcgaaccctttggtgggtttacgcgggcacgcacgctcccatcgcgggcgccatggcgggactgggcaagccctacaccggccacccaggtgacgccttcgagggtctcgttcagcgaattcggcttatcgtcccatctacgttgcggggcggggacggggaggcgggcccctactctccctccaacctcccctccaggtgcgcctttcagtttcatggccatgacgggtccgacgagtcgtttcccatcgagtatgtactgcggcttatgaacgactgggccgaggtcccgtgcaacccttacctgcgcatacagaacaccggcgtgtcggtgctgtttcaggggttttttcatcgcccacacaacgcccccgggggcgcgattacgccagagcggaccaatgtgatcctggggtccaccgagacgacggggttgtccctcggcgacctggacaccatcaaggggcggctcggcctggatgcccggccgatgatggccagcatgtggatcagctgctttgtgcgcatgccccgcgtgcagctcgcgtttcggttcatgggccccgaagatgccggacggacgagacggatcctgtgccgcgccgccgagcaggctattacccgtcgccgccgaacccggcggtcccgggaggcgtacggggccgaggccgggctgggggtggccggaacgggtttccgggccaggggggacggttttggcccgctccccttgttaacccaagggccctcccgcccgtggcaccaggccctgcggggtcttaagcacctacggattggcccccccgcgctcgttttggcggcgggactcgtcctgggggccgctatttggtgggtggttggtgctggcgcgcgcctataaaaaaggacgcaccgccgccctaatcgccagtgcgttccggacgccttcgccccacacagccctcccgaccgacacccccatatcgcttcccgacctccggtcccgatggccgtcccgcaatttcaccgccccagcaccgttaccaccgatagcgtccgggcgcttggcatgcgcgggctcgtcttggccaccaataactctcagtttatcatggataacaaccacccacacccccagggcacccaaggggccgtgcgggagtttctccgcggtcaggcggcggcactgacggaccttggtctggcccacgcaaacaacacgtttaccccgcagcctatgttcgcgggcgacgcaccggccgcctggttgcggcccgcgtttggcctgcggcgcacctattcaccttttgtcgttcgagaaccttcgacgcccgggaccccgtgaggcccagggagttccttctggggtgttttaatcaataaaagaccacaccaacgcacgagccttgcgtttaatgtcgtgtttattcaagggagtgggatagggttcgacggttcgaaacttaacacaccaaataatcgagcgcgtctagcccagtaacatgcgcacgtgatgtaggctggtcagcacggcgtcgctgtgatgaagcagcgcccggcgggtccgctgtaactgctgttgtaggcggtaacaggcgcggatcagcaccgccagggcgctacgaccggtgcgttgcacgtagcgtcgcgacagaactgcgtttgccgatacgggcggggggccgaattgtaagcgcgtcacctcttgggagtcatcggcggataacgcactgaatggttcgttggttatgggggagtgtggttccccagggagtgggtcgagcgcctcggcctcggaatccgagaggaacaacgaggtggcgtcggagtcttcgtcgtcagagacatacagggtctgaagcagcgacacgggcgggggggtagcgtcgatgtgtagcgcgagggaggatgcccacgaagacaccccagacaaggagctgcccgtgcgtggatttgtggaagacgcggaagccgggacggatgggcggttttgcggtgcccggaaccgaaccgccggatactccccgggtgctacatgcccgttttggggctggggttggggctggggttggggctggggttggggctggggttggggctggggttggggctggggttggggttggggttggggctggggttggggttggggctggggctggggctggggctggggctggggctggggctggggctggggctggggctggggctggggctggggctggggctggggctggggctggggttggggcgcggacaggcggctgacggtcaaatgcccccgggggcgcgcagatgtggtgggcgtggccaccggctgccgtgtagtggggcggcgggaaaccgggcctccgggcgtaacaccgccctccagcgtcaagtatgtggggggcgggcctgacgtcgggggcggggtgacgggttggaccgcgggaggcgggggagagggacctgcgggagaggatgaggtcggctcggccgggttgcggcctaaaacaggggccgtggggtcggcggggtcccagggtgaagggagggattcccgcgattcggacagcgacgcgacagcggggcgcgtaaggcgccgctgcggcccgcctacgggaaccctggggggggttggcgcgggacccgaggttagcggggggcggcggttttcgcccccgggcaaaaccgtgccggttgcgaccgggggcggaacgggatcgatagggagagcgggagaagcctggccggcggactggggaccgagcgggaggggcacaccagacaccaaagcgtggggcgctggctctgggggtttgggaggggccggggggcgcgcgaaatcggtaaccggggcgaccgtgtcggggagggcaggcggccgccaaccctgggtggtcgcggaagcctgggtggcgcgcgccagggagcgtgcccggcggtgtcggcgcgcgcgcgacccggacgaagaagcggtagaagcgcgggaggaggcgggggggcggggggcggtggcatcggggggcgccggggaactttggggggacggcaagcgccggaagtcgtcgcgggggcccacgggcgccggccgcgtgctttcggccgggacgcccggtcgtgcttcgcgagccgtgactgccggcccagggggccgcggtgcacactgggacgtggggacggactgatcggcggtgggcgaaagggggtccggggcaaggaggggcgcggggccgccggagtcgtcagacgcgagctcctccaggccgtgaatccatgcccacatgcgaggggggacgggctcgccgggggtggcgtcggtgaatagcgtgggggccaggcttccgggccccaacgagccctccgccccaacaaggtccgccgggccgggggtcgggttcgggaccgaggggctctggtcgtcgggggcgcgctggtacaccggatgccccgggaatagctcccccgacaggagggaggcgtcgaacggccgcccgaggatagctcgcgcgaggaaggggtcctcgtcggtggcgctcgcggcgaggacgtcctcgccgcccgccacaaacgggagctcctcggtggcctcgctgccaacaaaccgcatgtcgggggggccgggggggtccgggttttcccacaacaccgcgaccggggtcatggagatgtccacgagcaccaggcacggcgggccccgggcgaggggccgctcggcgatgagcgcggacaggcgcgggagctgtgccgccagacacgcgttttcgatcgggttaaggtcggcgtgcaggaggcggacggcccacgtctcgatgtcggacgacacggcatcgcgcaaggcggcgtccggcccgcgagcgcgtgagtcaaacagcgtgaggcacagctccagttccgactcgcgggaaaaggccgtggtgttgcggagcgccacgacgacgggcgcgcccaggagcactgccgccagcaccaggtccatggccgtaacgcgcgccgcgggggtgcggtgggtggcggcggccggcacggcgacgtgctggcccgtgggccggtagagggcgttggggggagcggggggtgacgcctcgcgcccccccgaggggctcagcgtctgcccagattccagacgcgcggtcagaagggcgtcgaaactgtcatactctgtgtagtcgtccggaaacatgcaggtccaaagagcggccagcgcggtgcttgggagacacatgcgcccgaggacgctcaccgccgccagcgcctgggcgggactcagctttcccagcgcggcgccgcgctcggttcccagctcggggaccgagcgccagggcgccagggggtcggtttcggacaacttgccgcggcgccagtctgccagccgcgtgccgaacatgaggccccgggtcggagggcctccggccgaaaacgctggcagcacgcggatgcgggcgtctggatgcggggtcaggcgctgcacgaatagcatggaatctgctgcgttctgaaacgcacgggggagggtgagatgcatgtactcgtgttggcggaccagatccaggcgccaaaaggtgtaaatgtgttccggggagctggccaccagcgccaccagcacgtcgttctcgttaaaggaaacgcggtgcctagtggagctctggggtccgagcggcggccccggggccgccgcgtcacccccccattccagctgggcccagcgacacccaaactcgcgcgtgagagtggtcgcgacgagggcgacgtagagctcggccgccgcatccatcgaggccccccatctcgcctggcggtggcgcacaaagcgtccgaagagctgaaagttggcggcctgggcgtcgctgagggccagctgaagccggttgatgacggtgaggacgtacatggccgtgacggtcgaggccgactccagggtgtccgtcggaagcggggggcgaatgcatgccgcctcgggacacatcagcagcgcgccgagcttgtcggtcacggccgggaagcagagcgcgtactgcagtggcgttccatccgggaccaaaaagctgggggcgaacggcctatccagcgtactggtggcctcgcgcagcaccaggggccccgggcctccgctcactcgcaggtacgcctcgccccggcggcgcagcatctgcgggtcggcctcttggccgggtggggcggacgcccgggcgcgggcgtctagggcgcgaagatccacgagcaggggcgcgggcgcggccgccgcgcccgcgcccgtctggcctgtggccttggcgtacgcgctatataagcccatgcggcgttggatgagctcccgcgcgccccggaactcctccaccgcccatggggccaggtccccggccaccgcgtccaattccgccaacaggccccccagggtgtcaaagttcatctcccaggccacccttggcaccacctcgtcccgcagccgggcgctcaggtcggcgtgttgggccacgcgccccccgagctcctccacggccccggcccgctcggcgctcttggcgcccaggacgccctggtacttggcgggaaggcgctcgtagtcccgctgggctcgcagccccgacacagtgttggtggtgtcctgcagggcgcgaagctgctcgcatgccgcgcgaaatccctcgggcgatttccaggcccccccgcgaacgcggccgaagcgaccccatacctcgtcccactccgcctcggcctcctcgaaagacctccgcagggcctcgacgcggcgacgggtgtcgaagagcgactgcaggcgcgcgccctgtcgcgtcaggaggcccgggccgtcgccgctggccgcgcttagcgggtgcgtctcaaaggtgcgctgggcatgttccaaccaggcgaccgcctgcacgtcgagctcgcgcgccttctccgtctggtccaacagaatctcgacctgatccgcgatctcctccgccgagcgcgcctggtccagcgtcttggccacggtcgccgggacggcaaccaccttcagcagggtcttcagattggccagaccctcggcctcgagctgggcccggcgctcgcgcgcggccagcacctcccgcaaccccgccgtgacccgctcggtggcttcggcgcgctgctgtttggcgcgcaccacggcgtccttggtatcggccaggtcctgtcgggtcacgaatgcgacgtagtcggcgtacgccgtgtccttcacggggctctggtccacgcgctccagcgccgccacacacgccaccagcgcgtcctcgctcgggcagggcagggtgacccctgcccggacaagctcggcggccgccgccgggtcgttgcgcaccgcggatatctcctccgcggcggcggccaggtccagcgccacgcttccgatcgcgcgccgcgcgtcggcccggagggcgtccaggcgatcgcggatatccacgtactcggcgtagcccttttgaaaaaacggcacgtactggcgcagggccggcacgccccccaagtcttccgacaggtgtaggacggcctcgtggtagtcgataaacccgtcgttcgcctgggcccgctccagcagcccccccgcgagccgcagaagccgcgccaggggctcggtgtccacccgaaacatgtcggcgtacgtgtcggccgcggccccgaaggccgcgctccagtcgatgcggtgaatggctgcgagcggggggagcatggggtggcgctggttctcgggggtgtatgggttaaacgcaagggccgtctccagggcaagggtcaccgccttggcgttggttcccagcgcctgctcggcccgctttcggaagtcccgggggttgtagccgtgcgtgcccgccagcgcctgcaggcgacggagctcgaccacgtcaaactcggcaccgctttccacgcggtccagcacggcctccacgtcggcggcccagcgctcgtggctactgcgggcgcgctgggccgccatcttctctctgaggtcggcggtggcggcctcaagttcgtcggcgcggcgtcgcgtggcgccgatgacctttcccagctcctgcagggcgcgcccgctgggggagtggtccccggccgtcccttcggcgtgcaacaggcccccgaacctgccctcgtggcccgcgaggctttcccgcgcgccggtggtcgcgcgcgtcgcggcctggatcagggaggcatgctctccctccggttggttggcggcccggcgcacctggacgacaaggtcggcggcagccgaccctaaggtcgtgagctgggcgatggccccccgcgcgtccagggccaaccgagtcgccttgacgtatcccgcggcgctgtcggccatggccgctaggaaggccaggggggaggccgggtcgctggcggccgcgcccagggccgtcactgcgtcgaccaggacgcggtgcgcccgcacggccgcatccaccgtcgacgcggggtctgccgtcgcgacggcggcgctgccggcgttgatggcgttcgagacggcgtgggctatgatcggggcgtgatcggcgaagaactgcaagagaaacggagtctcgggggcgttggcgaacaggttcttcagcaccaccacgaagctgggatgcaagccggacagagccgtcgccgtgtccggagtcgggtgctccagggcatctcggtactgccccagcagcccccacatgtccgcccgcagcgccgccgtaacctccgggggcgccccccgaacggcctcggggaggtccgaccagcccgccggcagggaggcccgcagggtcgtcaggacggccggacaggcctttagccccacaaagtcagggaggggccgcaggaccccctggagtttgtgcaagaacttctcccgggcgtcgcgggccaccttcgcccgctcccgcgctccctcgagcattgcctccagggagcgcgcgcgctcccgcaaacgggcacgcgcatcgggggcgagctctgccgtcagcttggcggcatccatggcccgcgcctgccgcagcgcttcctcggccatgcgcgtggcctctggcgacagcccgccgtcgtcggggtagggcgacgcgccgggcgcaggaacaaaggccgcgtcgctgtccagctgctggcccagggccgcatctagggcgtcgaagcgccgcagctcggccagacccgagctgcggcgcgcctgctggtcgttaatgtcgcggatgctgcgcgccagctcgtccagcggcttgcgttctatcagcccttggttggcggcgtccgtcaggacggagagccaggccgccaggtcctcgggggcgtccagcgtctggccccgctgtatcagatcccgcaacaggatggccgtggggctggtcgcgatcgggggcggggcgggaatggcggcgctctgcgcgatgtcccgcgtgtgctggtcgaagacaggcagggactctagcagctggaccacgggcacgacggcggccgaagccacgtgaaaccggcggtcgttgttgtcgctggcctgcagagccttggcgctgtatacggccccccggtaaaagtactccttaaccgcgccctcgatcgcccgacgggcctgggtccgcacctcctccagccgaacctgaacggcctcggggcccagggggggtgggcgcggagccccctgcggggccgccccggccggggcgggcattacgccgaggggcccggcgtgctgtgagaccgcgtcgaccccgcgagcgagggcgtcgagggcctcgcgcatctggcgatcctccgcctccaccctaatctcttcgccacgggcaaatttggccagagcctggactctatacagaagcggttctgggtgcgtcggggtggcgggggcaaaaagggtgtccgggtgggcctgcgagcgctccagaagccactcgccgaggcgtgtatacagattggccggcggggccgcgcgaagctgcagctccaggtccgcgagttccccgtaaaaggcgtccgtctcccgaatgacatccctagccacaaggatcagcttcgccagcgccaggcgaccgatcagagagttttcgtccagcacgtgctggacgaggggcagatgggcggccacgtcggccaggctcaggcgcgtggaggccagaaagtcccccacggccgttttccggggcagcatgctcagggtaaactccagcagggcggcggccgggccggccaccccggcctgggtgtgcgtccgggccccgttctcgatgagaaaggcgaggacgcgttcaaagaaaaaaataacacagagctccagcagccccggagaagccggatacggcgaccgtaaggcgctgatggtgagccgcgaacacgcggcgacctcgcgggccagggcggcggagcacgcggtgaacttaaccgccgtggcggccacgtttgggtgggcctcgaacagctgggcaaggtctgcgcccgggggctcgggtgagcggcgagtcttcagcgcctcgagggcctgcgaggacgccggaaccgtgggcccgtcgtcctcgcccgcctcggcgaccggcggcccggccgggtcggggggtgccgaggcgaggacaggctccggaacggaggcggggaccgcggccccgacgggggttttgcctttgggggtggatttcttcttggttttggcagggggggccgagcgtttcgttttctcccccgaagtcaggtcttcgacgctggaaggcggagtccaggtgggtcggcggcgcttgggaaggccggccgagtagcgtgcccggtgccgaccaaccgggacgacgcccatctccaggacccgcatgtcgtcgtcatcttcttcggccgcctctgcggcggggggcttgggggcggagggaggcggtggtgggatcgcggagggtgggtcggcggaggggggatccgtgggtggggtacccttcagggccaccgcccatacatcgtcgggcgcccgattcgggcgcttggcctctggttttgccgacggaccggccgtcccccgggatgtctcggaggccctgtcgtcgcgacgggcccgggtcggtggcggcgactgggcggctgtgggcgggtggggccccgtgccccctaccccctcccgggggcccacgccgacgcagggctcccccaggcccgcgatctcgccccgcagggggtgcgtgatggccacgcgccgttcgctgaacgcttcgtcctgcaggtaagtctcgctggccccgtaaagatgcagagccgcggccgtcaagtccgcaggagccgcgggttccgggcccgacggcacgaaaaacaccatggctcccgcccaccgtacgtccgggcgatcgcgggtgtaatacgtcaggtatggatacatgtcccccgcccgcactttggcgatgaacgcgggggtgccctccggaaggccgtgcgggtcaaaaaggtatgcggtgtcgccgtccctgaacagccccatccctagggggccaatggttaggagcgtgtacgacagggggcgcagggcccacgggccggcgaagaacgtgtgtgcggggcattgtgtctccagcaggcccgccgcgggctccccgaagaagcccacctcgccgtatacgcgcgagaagacacagcgcagtccgccgcgcgcccctgggtactcgaggaagttggggagctcgacgatcgaacacatgcgcggcggcccagggcccgcggtcgcgcgcgtccactcgcccccctcgaccaaacaaccctcgatggcctccgcggacagaacgtcgcgagggcccacatcaaatatgaggctgagaaaggacagcgacgagcgcatgcacgataccgacccccccggctccaggtcgggcgcgaactggttccgagcaccggtgaccacgatgtcgcgatcccccccgcgttccatcgtggagtgcggtggggtgcccgcgatcatatgtgccctactggccagagacccggcctgtttatggaccggacccccggggttagtgttgtttccgccacccatgcccccgtaccatggccccggttcccctgattaggctacgagtcgcggtgatcgcttcccaaaaaccgagctgcgtttgtctgtcttgatctttcccccccccgcccgcccgcccgcccgcacaccataacaccgagaacaacacacgggggtgggcgtaacataataaagctttattggtaactagttaacggcaagtccgtgggtggcgcgacggtgtcctccgggctcatctcgtcgtcctcgacgggggtgttggaatgaggcgccccctcgcggtccgcctggcgtgggccgtgcccataggcctccggcttctgtgcgtccatgggcataggcgcggggagactgtttccggcgtcgcggacctccaggtccctgggagactccggtccggctaacggacgaaacgcggaagcgcgaaacacgccgtcggtgacccgcaggagctcgttcatcagtaaccaatccatactcagcgtaacggccagcccctggcgagacagatccacggagtccggaaccgcggtcgtctggcccagggggccgaggctgtagtccccccaggcccctaggtcgcgacggctcgtaagcacgacgcggtcggccgcggggctttgcgggggggcgtcctcgggcgcatgcgccattacctctcggatggccgcggcgcgctggtcggccgagctgaccaagggcgccacgaccacggcgcgctccgtctgcaggcccttccacgtgtcgtggagttcctggacaaactcggccacgggctcgggtcccgcggccgcgcgcgcggcttgatagcaggccgagagacgccgccagcgcgctagaaactgacccatgaagcaaaacccggggacctggtctcccgacagcagcttcgacgcccgggcgtgaatgccggacacgacggacagaaacccgtgaatttcgcgccggaccacggccagcacgttgtcctcgtgcgacacctgggccgccagctcgtcacacacccccaggtgcgccgtggtttcggtgatgacggaacgcaggctcgcgagggacgcgaccagcgcgcgcttggcgtcgtgatacatgctgcagtactgactcaccgcgtcccccatggcctcggggggccagggccccaggcggtcgggcgtgtccccgaccaccgcatacaggcggcgcccgtcgctctcgaaccgacactcgaaaaaggcggagagcgtgcgcatgtgcagccgcagcagcacgatggcgtcctccagttggcgaatcagggggtctgcgcgctcggcgaggtcctgcagcaccccccgggcggccagggcgtacatgctaatcaacaggaggctggtgcccacctcggggggcggggggggctgcagctggaccaggggccgcagctgctcgacggcacccctggagatcacgtacagctcccggagcagctgctctatgttgtcggccatctgcatagtggggccgaggccgccccgggcggccggttcgaggagggtaatcagcgcgcccagtttggtgcgatggccctcgaccgtggggagatagcccagcccaaaatcccgggcccaggccaacacacgcagggcgaactcgaccgggcgtggaaggtaggccgcgctacacgtggccctcaacgcgtccccgaccaccagggccagaacgtaggggacgaagcccgggtcggcgaggacgttggggtgaatgccctcgagggcggggaagcggatctgggtcgccgcggccaggtggacagagggggcgtggctgggctgcccgacggggagaagcgcggacagcggcgtggccggggtggtgggggtgatgtcccagtgggtctgaccatacacgtcgatccagatgagcgccgtctcgcggagaaggctgggttgaccggaactaaagcggcgctcggccgtctcaaactcccccacgagcgcccgccgcaggctcgccagatgttccgtcggcacggccggacccatgatacgcgccagcgtctggctcagaacgccccccgacaggccgaccgcctcgcagagccgcccgtgcgtgtgctcgctggcgccctggacccgcctgaaagtttttacgtagttggcatagtacccgtattcccgcgccagaccaaacacgttcgaccccgcgagggcaatgcacccaaagagctgctggacttcgccgagtccgtggccggcgggcgtccgcgcggggacgcccgccgccagaaacccctccagggccgaaaggtagtgcgtgcagtgcgagggcgtgaacccagcgtcgatcagggtgttgatcaccacggagggcgaattggtattctggatcaacgtccacgtctgctgcaacagagccaacagccgctgctgggcgccggcggagggctgctccccgagctgcagcaggctggagacggcaggctggaagactgccagtgccgacgaactcaggaacggcacgtcgggatcaaacacggccacgtccgtccgcacgcgcgccattagcgtccccgggggcgcacaggccgagcgcgggctgacgcggctgagggccgtcgacacgcgcacctcctcgcggctgcgaaccatcttgttggcctccagtggcggaatcattatggccgggtcgatctcccgcacggtgtgctgaaactgcgccaacaggggcggcgggaccacagccccccgctcgggggtcgtcaggtactcgtccaccagggccaacgtaaagagggcccgtgtgaggggagtgagggtcgcgtcgtctatgcgctggaggtgcgccgagaacagcgtcacccgattactcaccagggccaagaaccggaggccctcttgcacgaacggggcggggaagagcaggctgtacgccggggtggtaaggttcgcgctgggctgccccaacgggaccggcgccatcttgagcgacgtctccccaagggcctcgatggaggtccgcgggctcatggccaagcagctcttggtgacggtttgccagcggtctatccactccacggcgcactggcggacgcggaccggccccagggccgccgcggtgcgcaggccggcggaatccagcgcatgggacgtgtcggagccggtgaccgcgaggatggtgtccttgatgacctccatctcccggaaggcctggtcgggggcctcggggagagccaccaccaagcggtgtacgagcaacccggggaggttctcggccaagagcgccgtctccggaagcccgtgggcccggtggagcgcgcacaggtgttccagcagcggccgccagcatgcccgcgcgtctgccggggcgatggccgttcccgacaacagaaacgccgccatggcggcgcgcagcttggccgtggccagaaacgccgggtcgtccgccccgtttgccgtctcggccgtgggggttggcggttggcgaaggccggctaggctcgccaataggcgctgcataggtccgtccgagggcggaccggcgggtgaggtcgtgacgacgggggcctcggacgggagaccgcggtctgccatgacgcccggctcgcgtgggtgggggacagcgtagaccaacgacgagaccgggcgggaatgactgtcgtgcgctgtagggagcggcgaattatcgatcccctgcggccctccaggaaccccgcaggcgttgcgagtaccccgcgtcttcgcggggtgttatacggccacttaagtcccggcatcccgttcgcggacccaggcccgggggattgtccggatgtgcgggcagcccggacggcgtgggttgcggactttctgcggggcggcccaaatggccctttaaacgtgtgtatacggacgcgccgggccagtcggccaacacaacccaccggaggcggtagccgcgtttggctgtggggtgggtggttccgccttgcgtgagtgtcctttcgacccccccctcccccgggtcttgctaggtcgcgatctgtggtcgcaatgaagaccaatccgctacccgcaaccccttccgtgtggggcgggagtaccgtggaactcccccccaccacacgcgataccgcggggcagggcctgcttcggcgcgtcctgcgccccccgatctctcgccgcgacggcccagtgctccccagggggtcgggaccccggagggcggccagcacgctgtggttgcttggcctggacggcacagacgcgccccctggggcgctgacccccaacgacgataccgaacaggccctggacaagatcctgcggggcaccatgcgcgggggggcggccctgatcggctccccgcgccatcatctaacccgccaagtgatcctgacggatctgtgccaacccaacgcggatcgtgccgggacgctgcttctggcgctgcggcaccccgccgacctgcctcacctggcccaccagcgcgccccgccaggccggcagaccgagcggctgggcgaggcctggggccagctgatggaggcgaccgccctggggtcggggcgagccgagagcgggtgcacgcgcgcgggcctcgtgtcgtttaacttcctggtggcggcgtgtgccgcctcgtacgacgcgcgcgacgccgccgatgcggtacgggcccacgtcacggccaactaccgcgggacgcgggtgggggcgcgcctggatcgtttttccgagtgtctgcgcgccatggttcacacgcacgtcttcccccacgaggtcatgcggtttttcggggggctggtgtcgtgggtcacccaggacgagctagcgagcgtcaccgccgtgtgcgccgggccccaggaggcggcgcacaccggccacccgggccggccccgctcggccgtgatcctcccggcgtgtgcgttcgtggacctggacgccgagctggggctggggggcccgggcgcggcgtttctgtacctggtattcacttaccgccagcgccgggaccaggagctgtgttgtgtgtacgtgatcaagagccagctccccccgcgcgggttggagccggccctggagcggctgtttgggcgcctccggatcaccaacacgattcacggcaccgaggacatgacgcccccggccccaaaccgaaaccccgacttccccctcgcgggcctggccgccaatccccaaaccccgcgttgctcggctggccaggtcacgaacccccagttcgccgacaggctgtaccgctggcagccggaccttcgggggcgccccaccgcacgcacctgtacgtacgccgcctttgcagagctcggcatgatgcccgaggatagtccccgctgcctgcaccgcaccgagcgctttggggcggtcagcgtccccgttgttattctggaaggcgtggtgtggcgccccggcgagtggcgggcatgcgcgtgagcgtagcaaacgccccgcccacacaacgctccgcccccaaccccttccccgctgtcactcgtggttcgttgacccggacgtccgccaaataaagccactgaaacccgaaacgcgagtgttgtaacgtcctttgggcgggaggaagccacaaaatgcaaatgggatacatggaaggaacacacccccgtgactcaggacatcggcgtgtccttttgggtttcactgaaactggcccgcgccccacccctgcgcgatgtggataaaaagccagcgcgggtggtttagggtaccacaggtgggtgctttggaaacttgtcggtcgccgtgctcctgtgagcttgcgtccctccccggtttcctttgcgctcccgccttccggacctgctctcgcctatcttctttggctgtcggtgcgattcgtcaggcagcggccttgtcgaatctcgaccccaccactcgccggacccgccgacgtcccctctggagcccgccgaaacccgccgcgtctgttgaaatggccagccgcccagccgcatcctctcccgtcgaagcgcgggccccggttgggggacaggaggccggcggccccagcgcagccacccagggggaggccgccggggcccctctcgcccacggccaccacgtgtactgccagcgagtcaatggcgtgatggtgctttccgacaagacgcccgggtccgcgtcctaccgcatcagcgatagcaactttgtccaatgtggttccaactgcaccatgattatcgacggagacgtggtgcgcgggcgcccccaggacccgggggccgcggcatcccccgctcccttcgttgcggtgacaaacatcggagccggcagcgacggcgggaccgccgtcgttgcattcgggggaaccccacgtcgctcggcggggacgtctaccggtacccagacggccgacgtcccagccgaggcccttgggggcccccctcctcctccccgcttcaccctgggtggcggctgttgctcctgtcgcgacacacggcgccgctctgcggtattcgggggggagggggatcccgtcggccccgcggagttcgtctcggacgaccggtcgtccgattccgactcggatgactcggaggacaccgactcggagacgctgtcacacgcctcctcggacgtgtccggcggggccacgtacgacgacgcccttgactccgattcgtcatcggatgactccctgcagatagatggccccgtgtgtcgcccgtggagcaatgacaccgcgcccctggatgtttgccccgggacccccggcccgggcgccgacgccggtggtccctcagcggtagacccacacgcgccgacgacaggggccggcgctggtcttgcggccgatcccgccgtggcccgggacgacgcggaggggctttcggacccccggccacgtctgggaacgggcacggcctaccccgtccccctggaactcacgcccgagaacgcggaggccgtggcgcgctttctgggagatgccgtgaaccgcgaacccgcgctcatgctggagtacttttgccggtgcgcccgcgaggaaaccaagcgtgtcccccccaggacattctgcagcccccctcgcctcacggaggacgactttgggcttctcaactacgcgctcgtggagatgcagcgcctgtgtctggacgttcctccggtcccgccgaacgcatacatgccctattatctcagggagtatgtgacgcggctggtcaacgggttcaagccgctggtgagccggtccgctcgcctttaccgcatcctgggggttctggtgcacctgcggatccggacccgggaggcctcctttgaggagtggctgcgatccaaggaagtggccctggactttggcctgacggaaaggcttcgcgagcacgaagcccagctggtgatcctggcccaggttctggaccattacgactgtctgatccacagcacaccgcacacgctggtcgagcgggggctgcaatcggccctgaagtatgaggagttttacctaaagcgctttggcgggcactacatggagtccgtcttccagatgtacacccgcatcgccggctttttggcctgccgggccacgcgcggcatgcgccacatcgccctggggcgagaggggtcgtggtgggaaatgttcaagttctttttccaccgcctctacgaccaccagatcgtaccgtcgacccccgccatgctgaacctggggacccgcaactactacacctccagctgctacctggtaaacccccaggccaccacaaacaaggcgaccctgcgggccatcaccagcaacgtcagtgccatcctcgcccgcaacgggggcatcgggctatgcgtgcaggcgtttaacgactccggccccgggaccgccagcgtcatgcccgccctcaaggtcctcgactcgctggtggcggcgcacaacaaagagagcgcgcgtccgaccggcgcgtgcgtgtacctggagccgtggcacaccgacgtgcgggccgtgctccggatgaagggggtcctcgccggcgaagaggcccagcgctgcgacaatatcttcagcgccctctggatgccagacctgtttttcaagcgcctgattcgccacctggacggcgagaagaacgtcacatggaccctgttcgaccgggacaccagcatgtcgctcgccgactttcacggggaggagttcgagaagctctaccagcacctcgaggtcatggggttcggcgagcagatacccatccaggagctggcctatggcattgtgcgcagtgcggccacgaccgggagccccttcgtcatgttcaaagacgcggtgaaccgccactacatctacgacacccagggggcggccatcgccggctccaacctctgcaccgagatcgtccatccggcctccaagcgatccagtggggtctgtaatctgggaagcgtgaatctggcccgatgcgtctccaggcagacgtttgactttgggcggctccgcgacgccgtgcaggcgtgcgtgctgatggtgaacatcatgatcgacagcacgctacaacccacgccccagtgcacccgcggcaacgacaacctgcggtccatgggaatcggcatgcagggcctgcacacggcctgcctgaagctggggctggatctggagtctgccgaatttcaggacctgaacaaacacatcgccgaggtgatgctgctgtcggcgatgaagaccagcaacgcgctgtgcgttcgcggggcccgtcccttcaaccactttaagcgcagcatgtatcgcgccggccgctttcactgggagcgctttccggacgcccggccgcggtacgagggcgagtgggagatgctacgccagagcatgatgaaacacggcctgcgcaacagccagtttgtcgcgctgatgcccaccgccgcctcggcgcagatctcggacgtcagcgagggctttgcccccctgttcaccaacctgtttagcaaggtgacccgggacggcgagacgctgcgccccaacacgctcctgctaaaggaactggaacgcacgtttagcgggaagcgcctcctggaggtgatggacagtctcgacgccaagcagtggtccgtggcgcaggcgctcccgtgcctggagcccacccaccccctccggcgattcaagaccgcgtttgactacgaccagaagttgctgatcgacctgtgtgcggaccgcgccccctacgtcgaccatagccaatccatgaccctgtatgtcacggagaaggcggacgggaccctcccagcctccaccctggtccgccttctggtccacgcatataagcgcggactaaaaacagggatgtactactgcaaggttcgcaaggcgaccaacagcggggtctttggcggcgacgacaacattgtctgcacgagctgcgcgctgtgaccgacaaaccccctccgcgccaggcccgccgccactgtcgtcgccgtcccacgcgctcccccgctgccatggattccgcggccccagccctctcccccgctctgacggcccatacgggccagagcgcgccggcggacctggcgatccagattccaaagtgccccgaccccgagaggtacttctacacctcccagtgtcccgacattaaccacctgcgctccctcagcatccttaaccgctggctggaaaccgagcttgttttcgtgggggacgaggaggacgtctccaagctttccgagggcgagctcagcttttaccgcttcctcttcgctttcctgtcggccgccgacgacctggttacggaaaacctgggcggcctctccggcctgtttgagcagaaggacattctccactactacgtggagcaggaatgcatcgaagtcgtacactcgcgcgtgtacaacatcatccagctggtgctttttcacaacaacgaccaggcgcgccgcgagtacgtggccggcaccatcaaccacccggccatccgcgccaaggtggactggttggaagcgcgggtgcgggaatgcgcctccgttccggaaaagttcattctcatgatcctcatcgagggcatcttttttgccgcctcgtttgccgccatcgcctaccttcgcaccaacaaccttctgcgggtcacctgccagtcaaacgacctcatcagccgggacgaggccgtgcacacgacggcctcgtgttacatctacaacaactacctcggcgggcacgccaagcccccgcccgaccgcgtgtacgggctgttccgccaggcggtcgagatcgagatcggatttatccgatcccaggcgccgacggacagccatatcctgagcccggcggcgctggcggccatcgaaaactacgtgcgattcagcgcggatcgcctgttgggccttatccacatgaagccactgttttccgccccaccccccgacgccagctttccgctgagcctcatgtccaccgacaaacacaccaattttttcgagtgtcgcagcacctcctacgccggggcggtcgtcaacgatctgtgagggtcgcggcgcgcttctacccgtgtttgcccataataaacctctgaaccaaactttgggtctcattgtgattcttgtcagggacgcgggggtgggagaggataaaaggcggcgcaaaaagcagtaaccaggtccggccagattctgagggcataggataccataattttattggtgggtcgtttgttcggggacaagcgcgctcgtctgacgtttgggctactcgtcccagaatttggccaggacgtccttgtagaacgcgggtgggggggcctgggtccgcagctgctccagaaacctgtcggcgatatcaggggccgtgatatgccgggtcacgatagatcgcgccaggttttcgtcgcggatgtcctggtagataggcaggcgtttcagaagagtccacggcccccgctccttggggccgataagcgatatgacgtacttaatgtagcggtgttccaccagctcggtgatggtcatgggatcggggagccagtccagggactctggggcgtcgtggatgacgtggcgtcgccggctggccacataactgcggtgctcttccagcagctgcgcgttcgggacctggacgagctcgggcggggtgagtatctccgaggaggacgacctggggccggggtggcccccggtaacgtcccggggatccagggggaggtcctcgtcgtcttcgtatccgccggcgatctgttgggttagaatttcggtccacgagacgcgcgtctcggtgccgccggtggccggcggcagagggggcctggtttccgtggagcgcgagctggtgtgttcccggcggatggcccgccgggtctgagagcgactcgggggggtccagtgacattcgcgcagcacatcctccacggaggcgtaggtgttattgggatggaggtcggtgtggcagcggacaaagagggccaggaactgggggtagctcatcttaaagtacttcagtatatcgcgacagttgatcgtgggaatgtagcaggcgctaatatccaacacaatatcgcagcccatcaacaggaggtcagtgtccgtggtgtacacgtacgcgaccgtgttggtgtgatagaggttggcgcaggcatcgtccgcctccagctgacccgagttaatgtaggcgtaccccagggcccggagaacgcgaatacagaacagatgcgccagacgcagggccggcttcgagggcgcggcggacggcagcgcggctccggacccggccgtcccccgggtccccgaggccagagaggtgccgcgtcggcgcatgttggaaaaggcagagctgggtctggagtcggtgatgggggaaggcggtggagaggcgtccacgtcactggcctcctcgtccgtccggcactgggccgtcgtgcgggccaggatggccttggctccaaacacaaccggctccatacaattgaccccgcgatcggtaacgaagatggggaaaagggacttttgggtaaacacctttaataagcgacagaggcagtgtagcgtaatggcctcgcggtcgtaactggggtatcggcgctgatatttgaccaccaacgtgtacatgacgttccacaggtccacggcaatgggggtgaagtacccggccggggccccaaggccccggcgcttgaccagatggtgtgtgtgggcaaacttcatcatcccgaacaaacccatgtcaggtcgattgtaactgcggatcggcctaactaaggcgtggttggtgcgacggtccgggacacccgagcctgtctctctgtgtatggtgacccagacaacaacaccgacacaagaggacaataatccgttaggggacgctctttataatttcgatggcccaactccacgcggattggtgcagcaccctgcatgcgccggtgcgggccaaccttccccccgctcattgcctcttccaaaagggtgtggcctaacgagctgggggcgtatttaatcaggctagcgcggcgggcctgccgtagtttctggctcggtgagcgacggtccggttgcttgggtcccctggctgccatcaaaaccccaccctcgcagcggcatacgccccctccgcgtcccgcacccgagaccccggcccggctgccctcaccaccgaagcccacctcgtcactgtggggtgttcccagcccgcgttgggatgacggattcccctggcggtgtggcccccgcctcccacgtggaggacgcgtcggacgcgtccctcgggcagccggaggagggggcgccctgccaggtggtcctgcagggcgccgagcttaatggaatcctacaggcgtttgccccgctgcgcacgagccttctggactcgcttctggttatgggagaccggggcatccttatccataacacgatctttggggagcaggtgttcctgcccctggaacactcgcaattcagtcggtatcgctggcgcggacccacggcggcgttcctgtctctcgtggaccagaagcgctccctcctgagcgtgtttcgcgccaaccagtacccggacctacgtcgggtggagttggcgatcacgggccaggccccgtttcgcacgctggttcagcgcatatggacgacgacgtccgacggcgaggccgttgagctagccagcgagacgctgatgaagcgcgaactgacgagctttgtggtgctggttccccagggaacccccgacgttcagttgcgcctgacgaggccgcagctcaccaaggtccttaacgcgaccggggccgatagtgccacgcccaccacgttcgagctcggggttaacggcaaattttccgtgttcaccacgagtacctgcgtcacatttgctgcccgcgaggagggcgtgtcgtccagcaccagcacccaggtccagatcctgtccaacgcgctcaccaaggcgggccaggcggccgccaacgccaagacggtgtacggggaaaatacccatcgtaccttctctgtggtcgtcgacgattgcagcatgcgggcggtgctccggcgactgcaggtcgccgggggcaccctcaagttcttcctcacgacccccgtccccagtctgtgcgtcaccgccaccggtcccaacgcggtatcggcggtatttctcctgaaaccccagaagatttgcctggactggctgggtcatagccaggggtctccttccgccgggagctcggcctcccgggcctctgggagcgagccaacagacagccaggactccgcgtcggacgcggtcagccacggcgatccggaagacctcgatggcgctgcccgggcgggagaggcgggggcctcgtacgcctgtccgatgccgtcgtcgaccacgcgggtcactcccacgaccaagcgggggcgctcggggggcgaggatgcgcacgcggacacggccctaaagaaacctaagacggggtcgcccaccgcacccccgcccgcagatccagtccccctggacacggaggacgactccgatgcggcggacgggacggcggcccgtcccgccgctccagacgcccgaagcggaagccgttacgcgtgttactttcgcgacctcccgaccggagaagcaagccccggcgccttctccgccttccgggggggcccccaaaccccgtctggttttggattcccctgacggggcggggccttagcggccgcccaaccctcgcaacatcccggggttaatgtaaataaacttggtattgcccaacactctcccgcgtgtcgcgtgtggttcatgtgtgtgcctggcgcccccaccctcgggttcgtgtatttcctttccctgtccttataaaagccgtatgtggggcgctgacggaaccaccccgcgtgccatcacggccaaggcgcgggatgctccgcaacgacagccaccgggccgcgtccccggaggacggccagggacgggtcgacgacggacggccacacctcgcgtgcgtgggggccctggcgcgggggttcatgcatatctggcttcaggccgccacgctgggttttgcgggatcggtcgttatgtcgcgcgggccgtacgcgaatgccgcgtctggggcgttcgccgtcgggtgcgccgtgctgggctttatgcgcgcgccccctcccctcgcgcggcccaccgcgcggatatacgcctggctcaaactggcggccggtggagcggcccttgttctgtggagtctcggggagcccggcacgcagccgggggccctggccccgggcccggccacccagtgcctggcgctgggcgccgcctatgcggcgctcctggtgctcgccgatgacgtctatccgctctttctcctcgccccggggcccctgttcgtcggcaccctggggatggtcgtcggcgggctgacgatcggaggcagcgcgcgctactggtggatcggtgggcccgccgcggccgccctggccgcggcggtgttggcgggcccgggggcgaccaccgccagggactgcttctccagggcgtgccccgaccaccgccgcgtctgcgtcatcgtcgcaggcgagtctgtttcccgccgccccccggaggacccagagcgacccggggacccagggccaccgtcccccccgacaccccaacgatcccaggggccgccggccgatgaggtcgcaccggccggggtagcgcggcccgaaaacgtctgggtgcccgtggtcacctttctgggggctggcgcgctcgccgtcaagacggtgcgagaacatgcccggggaacgccgggcccgggcctgccgctgtggccccaggtgtttctcggaggccatgtggcggtggccctgacggagctgtgtcaggcgcttgcgccctgggaccttacggacccgctgctgtttgttcacgccggactgcaggtcatcaacctcgggttggtgtttcggttttccgaggttgtcgtgtatgcggcgctagggggtgccgtgtggatttcgttggcgcaggtgctggggctccggcgtcgcctgcacaggaaggaccccggggacggggcccggttggcggcgacgcttcggggcctcttcttctccgtgtacgcgctggggtttggggtgggggcgctgctgtgccctccggggtcaacgggcgggcggtcgggcgattgatatatttttcaataaaaggcattagtcccgaagaccgccggtgtgtgatgatttcgccataacacccaaaccccggatggggcccgggtataaattccggaaggggacacgggctaccttcactaccgagggcgcttggtcgggaggccgcatcgaacgcacacccccatccggtggtccgtgtggaggtcgtttttcagtgcccggtctcgctttgccgggaacgctagccgatccctcgcgagggggaggcgtcgggccgcgagacccccccgttacctttttaatatctatatagtttggtccccctctatcccgcccaccgctgggcgctataaagccgccaccctctcttccctcaggtcatccttggtcgatcccgaacgacacacggcgtggagcaaaacgcctccccctgagccgctttcctaccagcgcaacggcatgcctctgcgggcatcggaacacgcctaccggcccctgggccccgggacaccccccatgcgggctcggctccccgccgcggcctgggttggcgtcgggaccatcatcgggggagttgtgatcattgccgcgttggtcctcgtgccctcgcgggcctcgtgggcactttccccatgcgacagcggatggcacgagttcaacctcgggtgcatatcctgggatccgacccccatggagcacgagcaggcggtcggcggctgtagcgccccggcgaccctgatcccccgcgcggctgccaaacagctggccgccgtcgcacgcgtccagtcggcaagatcctcgggctactggtgggtgagcggagacggcattcgggcctgcctgcggctcgtcgacggcgtcggcggtattgaccagttttgcgaggagcccgcccttcgcatatgctactatccccgcagtcccgggggctttgttcagtttgtaacttcgacccgcaacgcgctggggctgccgtgaggcgcgtgtactgcggtctgtctcgtctcctcttctccccttccctccccctccgcatcccaggatcacaccggccaacgagggttggggggtccggcacggacccaaaataataaacacacaatcacgtgcgataaaaagaacacgcggtcccctgtggtgtttttggttatttttattaaatctcgtcgtcaaacagggggaaaggggcgtggtctagcgacggcagcacgggtggaggcgttcaccggctccggcgtccttcgcgtttaagcttggtcaggagggcgctcagggcggcgacgttggtcgggccgtcgttggtcagggcgttggctcgatggcgggcgaggacgggcgaggggctcaacggcgggggcgggggcccggtgcggcccgggggggaaaatagggcggatcccccccagtcgtacaggggattttccgcctcaatgtacggggaggccggcgctgcattcgccgtgttcgcgcagacgttttcgtagacccgcatccatggtatttcctcgtagacacgccccccgtcctcgctcacagtctcgtatattgactcgtcgtcctcgtagggggcgtgccgttcgcgggccgaggcggcgtgggtggctttgcggcgggcgtcgtcgtcgtcgtcggccgtcagatacgtggcttccatctggtcgggttctccctccggggcgggtccccacccccgtggccgatcgaggctccccagagacgcgcgccggacgaggagggggcacgtcgccgccggcggtcgcctgtcgggtcccgcgacgttacgggccgggaggcgcgggggcacctcccccatgtgcgtgtaatacgtggccggctgtgcggccgcagcggggggctcggcgaccgggtcgtccgcatccggaagcgggggcgccgcgccgtccgcgcggcgcctccggaaccgccgggtggccgcgggggtcgagtgtaggcgaggtcgggggaggggcgggggctcgttgtcgcgccgcgcccgctgaatcttttcccgacaggtcccaccccccgcgcgatgcccccccgggccgcgggccatgtcgtccgggggaggccccgcggaccacgtcgtccggcgagacgccacgagccgcaggatggactcgtagtggagcgacggcgccccgctgcggagcagatccgcggccagggcggccccgaaccaagccttgatgctcaactccatccgggcccagctgggggcggtcatcgtggggaacaggggggcggtggtccgacagaaacgctcctggctgtccaccgcggcccgcagatactcgttgttcaggctgtcggtggcccagacgccgtacccggtgagggtcgcgttgatgatatactgggcgtggtgatggacgatcgacagaacctccaccgtggatacgacggtatccacggtcccgtacgtaccgccgctccgcttgccggtctgccacaggttggctaggcgcgtcaggtggcccaggacgtcgctgaccgccgccctgagcgccatgcactgcatggagccggtcgtgccgctgggaccccggtccagatggcgcgcgaacgtttccgcgggcgcctccgggctgccgccgagcgggaggaaccggcgattggagggactcagccggtggcatacgtgcttgtctgtcgtccacagcatccaggacgcccaccggtacagcacggagacgtaggccaggagctcgttgagccgcagtgcggtgtcggtgctggggcggcttgggtccgccgggcgcataaagaacatgtactgctgaatccgatggagggcgtcgcgcaggccggccacggtggcggcgtacttggccgccgcggccccgctcttgaacggggtgcgcgccagcagctttggcgccagggtgggccgcagcagcacgtgaaggctggggtcgcagtcgcccacggggtcctcggggacgtccaggccgctgggcaccaccgtctgcaggtacttccagtactgcgtgaggatggcgcggctcaactggccgccggtgagctccacctcgcccagcgcctgggtggcggccgaagcgtagtgccggatgtactcgtagtgcgggtcgctggcgagcccgtccacgatcaaactctcgggaaccgtgttgtgttgccgcgcggccaaccggacgctgcgatcggtgcaggtcagaaacgccggctgcgcgtcgtcggagcgctgccgcaaggcgcccacggccgcgctaaggagcccctccggggtggggagcagacacccgccgaagatgcgccgctcgggaacgcccgcgttgtcgccgcggatcaggttggcaggcgtcaggcaccgcgccagccgcagggagctcgcgccgcgcgtccggcgctgcatggtgacgcccgttcggtcgggacccgccggtcggagttatgccgcgtccagggccatcggggcgctttttatcgggaggagcttatgggcgtggcgggcctcccagcccggtcgcgcgcctccccgacacgtgcgcccgcagggcggcggccccctcgtctcccatcagcagtttcctaaactgggacatgatgtccaccacgcggacccgcgggcccaacacggacccgccgcttacgggggcgggggggaagggctccaggtccttgagaagaaaggcggggtctgccgtcccggacacgggggcccggggcgctgaggaggcggggcgcagatccacgtgctccgcggccgcgcggacgtccgcccagaacttggcgggggtggtgcgcgcgtacaggggctgggtcgctcggaggacgcacgcgtagcgcaggggggtgtacgtgcccacctcgggggccgtgaatcccccgtcaaacgcggccagtgtcacgcacgccaccacggtgtcggcaaagcccagcagccgctgcaggacgagcccggcggccagaatggcgcgcgtggccgccgcgtcgtcccggcgccggtgcgcgtccccgcacgcccgggcgtactttaaggtcacggtcgccagggccgtgtgcagcgcgtacaccgcagcgcccagcacggcgttgagcccgctgttggcgagcagccggcgcgctgcggtgtcgcccagcgcctcgtgctcggcccccacgaccgcggggcttcccaggggcagggcgcgaaacagctcctcccgcgccacgtccgcaaaggcggggtggtgcacgtgcgggtgcaggcgcgcccccacgaccaccgagagccactggaccgtctgctccgccatcaccgccagcacatccagcacgcgccccaggaaggcggcctcccgcgtcaaaacgcaccggacggcgtcgggattgaagcgggcgagcagggccccggtggccaggtacgtcatgcggccggcatagcgggcggccacgcgacagtcgcggtccagcagcgcgcgcaccccgggccagtacagcagggaccccagcgagctgcgaaacaccgcggcgtcggggccggattggggggacactaacccccccgcgctcagtaacggcacggccgcggccccgacgggacgcaacgccgtgaggctcgcgaactgccgcctcagctcggcagccctgtcgtccaggtccgacccgcgcgcctctgcgtgaaggcgcgtcccgcacacccacccgttgatggccagccgcacgacggcatccgccaaaaagctcatcgcctgggcggggctggtttttgttcgacgatccgtcaggtcaagaatcccatcgcccgtgatataccaggccaacgcctcgccctgctgcagggtttggcggaaaaacaccgcggggttgtcgggggaggcgaagtgcatgacccccacgcgcgataacccgaacgcgctatccggacacgggtaaaacccggccggatgccccagggctagggcggagcgcacggactcgtcccacacggcaacctgaggggccagtcgatccaacgggaatgccgcccggagctccgggcccggcacgcgtccctccagaacctccaccttgggcggggaacgggccccgccgccgtcctccggcccgacgtcttccgggtagtcgtcctcctcgtactgcagctcctctaggaacagcggcgacggcgccacccgcgaaccgccgacccgccccaaaatagcccgcgcgtcgacgggacccaggtatcccccctgccgggcctgcggaggaccgcggggaacctcatcatcatcgtccaggcgaccgcgcaccgactggctacgggccgcatcgggcccggggcgctgccgggacgctcggcgatgggatgtgggcggggcttccgacgcgcgccgtcgtcgggctcgcgggccttcccgtcgacggcgcacgggcggctcgtcgcccgccatctcctccagagcctctagctcgctgtcgtcatccccgcggaacaccgcacgcaggtaccccatgaaccccaccccatcgcccgctggctcgtccgccacgggcgaggcgcgggggcgggtggatgcgcgcctcctacgccccgcgggttcgcgagccgacatggtggcgatagacgcgggttatcggatgtccgctaccccccaaaaaagaaaaagaccccacagcgcggatggaggccggggtaggtgccgccggaccccctcgcgatgggaatggacgggagcgacggggccggcgcaaaaaacgcagtatctcccgcgaaggctacccgccgccccagcccccggccaaatgcggaaacggtcccgcgctctcgcctttatacgcgggccgccctgcgacacaatcacccgtccgtggtttcgaatctacacgacaggcccgcagacgcggctaacacacacgccggcaacccagaccccagtgggttggttgcgcggtcccgtctcctggctagttcttttccccaccaccaaataatcagacgacaaccgcaggtttttgtaatgtatgtgctcgtgtttattgtggatacgaaccggggacgggaggggaaaacccagacgggggatgcgggtccggtcgcgccccctacccaccgtactcgtcaattccaagggcatcggtaaacatctgctcaaactcgaagtcggccatatccagagcgccgtagggggcggagtcgtggggggtaaatcccggacccggggaatccccgtcccccaacatgtccagatcgaaatcgtctagcgcgtcggcatgcgccatcgccacgtcctcgccgtctaagtggagctcgtcccccaggctgacatcggtcgggggggccgtcgacagtctgcgcgtgtgtcccgcggggagaaaggacaggcgcggagccgccagccccgcctcttcgggggcgtcgtcgtccgggagatcgagcaggccctcgatggtagacccgtaattgtttttcgtacgcgcgcggctgtacgcgtgttcccgcatgaccgcctcggagggcgaggtcgtgaagctggaatacgagtccaacttcgcccgaatcaacaccataaatgcgggcctggttgccatgcagggtgggaggggtcgtcaacggcgcccctggctcctccgtagccgcgctgcgcaccagcgggaggttaaggtgctcgcgaatgtggtttagctcccgcagccggcgggcctcgattggcactccccggacggtgagcgctccgttgacgaacatgaagggctggaacagacccgccaactgacgccagctctccaggtcgcaacagaggcagtcaaacaggtcgggccgcatcatctgctcggcgtacgcggcccataggatctcgcgggtcaaaaatagatacaaatgcaaaaacagaacacgcgccagacgagcggtctctcggtagtacctgtccgcgatcgtggcgcgcagcatttctcccaggtcgcgatcgcgtccgcgcatgtgcgcctggcggtgcagctgccggacgctggcgcgcaggtaccggtacagggccgagcagaagttggccaacacggttcgatagctctcctcccgcgcccgtagctcggcgtggaagaaacgagagagcgcttcgtagtagagcccgaggccgtcgcgggtggccggaagcgtcgggaaggccacgtcgccgtgggcgcgaatgtcgatttgggcgcgttcggggacgtacgcgtccccccattccaccacatcgctgggcagcgttgataggaatttacactcccggtacaggtcggcgttggtcggtaacgccgaaaacaaatcctcgttccaggtatcgagcatggtacatagcgcggggcccgcgctaaagcccaagtcgtcgaggagacggttaaagagggcggcgggggggacgggcatgggcggggagggcatgagctgggcctggctcaggcgccccgttgcgtacagcggaggggccgccggggtgtttttgggacccccggccgggcgggggggtggtggcgaagcgccgtccgcgtccatgtcggcaaacagctcgtcgaccaagaggtccattgggtggggttgatacgggaaagacgatatcgggcttttgatgcgatcgtccccgcccgcccagagagtgtgggacgcccgacggcgcgggaagagaaaaacccccaaacgcgttagaggaccggacggaccttatggggggaagtgggcagcgggaaccccgtccgttcccgaggaatgacagcccgtggtcgccaccccgcatttaagcaacccgcacgggccgccccgtacctcgtgacttccccccacattggctcctgtcacgtgaaggcgaaccgagggcggctgtccaacccaccccccgccacccagtcacggtccccgtcggattgggaaacaaaggcacgcaacgccaacaccgaatgaacccctgttggtgctttattgtctgggtacggaagtttttcactcgacgggccgtctggggcgagaagcggagcgggctggggctcgaggtcgctcggtggggcgcgacgccgcagaacgccctcgagtcgccgtggccgcgtcgacgtcctgcaccacgtctggattcaccaactcgttggcgcgctgaagcaggtttttgccctcgcagaccgtcacgcggatggtggtgatgccaaggagttcgttgaggtcttcgtctgtgcgcggacgcgacatgtcccagagctggaccgccgccatccgggcatgcatggccgccaggcgcccgaccgcggcgcagaagacgcgcttgttaaagccggccacccggggggtccatggcgcgtcggggtttgggggggcggtgctaaagtgcagctttctggccagcccctgcgcgggtgtcttggatcgggttggcgccgtcgacgcgggggcgtctgggagtgcggcggattctggctgggccgatttcctgccgcgggtggtctccgccgccggggccgcgggggccttagtcgccacccgctgggttcggggggcccggggggcggtggtgggtgtgcgtccggcccctccggacccagcgggcggcggaggcgcccgcgcaggccccgggccggacaaaaccgccccggaaacgggacgccgcgtccgggggacctccgggtgttcgtcgtcttcggatgacgagcccccgtagagggcataatccgactcgtcgtactggacgaaacggacctcgcccctcgggcgcgcgcgtgtctgtagggcgccacggcgggaggtggcaggcggactatcgggactcgccatacatgaagacggggtgtagtacagatcctcgtactcatcgcgcggaacctcccgcggacccgacttcacggagcggcgagaggtcatggttccacgaacacgctagggtcggatgcgcggacaattaggcctgggttcggacggcggggggtggtgcaggtgtggagaggtcgagcgataggggcggcccgggagagaagagagggtccgcaaaacccactggggatgcgtgagtggccctctgtgggcggtgggggagagtcttataggaagtgcatataaccacaacccatgggtctaaccaatccccaggggccaagaaacagacacgccccaaacggtctcggtttccgcgaagaaggggaagtcctgggacaccctccacccccacccctcaccccacacagggcgggttcaggcgtgcccggcagccagtagcctctggcagatctgacagacgtgtgcgataatacacacgcccatcgaggccatgcctacataaaagggcaccagggcccccggggcagacatttggccagcgttttgggtctcgcaccgcgcgcccccgatcccatcgcgcccgccctcctcgccgggcggctccccgtgcgggcccgcgtctcccgccgctaaggcgacgagcaagacaaacaacaggcccgcccgacagacccttctgggggggcccatcgtccctaacaggaagatgagtcagtggggatccggggcgatccttgtccagccggacagcttgggtcgggggtacgatggcgactggcacacggccgtcgctactcgcgggggcggagtcgtgcaactgaacctggtcaacaggcgcgcggtggcttttatgccgaaggtcagcggggactccggatgggccgtcgggcgcgtctctctggacctgcgaatggctatgccggctgacttttgtgcgattattcacgcccccgcgctatccagcccagggcaccacgtaatactgggtcttatcgactcggggtaccgcggaaccgttatggccgtggtcgtagcgcctaaaaggacgcgggaatttgcccccgggaccctgcgggtcgacgtgacgttcctggacatcctggcgacccccccggccctcaccaagccgatttccctgcggcagttcccgcaactggcgcccccccctccaaccggggccgggatacgcgcagatccttggttggagggggcgctcggggacccaagcgtgactccggccctaccggcgcgacgccgagggcggtccctcgtctatgccggcgagctgacgccggttcagacggaacacggggacggcgtacgagaagccatcgccttccttccaaaacgcgaggaggatgccggtttcgacattgtcgtccgtcgcccggtcaccgtcccggcaaacggcaccacggtcgtgcagccatccctccgcatgctccacgcggacgccgggcccgcggcctgttatgtgttggggcggtcgtcgctcaacgcccgcggcctcctggtcgttcctacgcgctggctccccgggcacgtatgtgcgtttgttgtttacaaccttacgggggttcctgtgaccctcgaggccggcgccaaggtcgcccagctcctggttgcgggggcggacgctcttccttggatccccccggacaactttcacgggaccaaagcgcttcgaaactaccccaggggtgttccggactcaaccgccgaacccaggaacccgccgctcttggtgtttacgaacgagtttgacgcggaggcccccccgagcgagcgcgggaccgggggttttggctctaccggtatttagcccatagcttggggttcgttccgggcaataaaaaacgtttgtatctcatctttcctgtgtgtagttgtttctgttggaggcctgtgggtctatcacacccgcccctccatcccacaaacacagaacacacgggttggatgaaaacacgcatttattgacccaaaacacacggagctgctcgagatgggccagggcgaggtgcggttggggaggctgtaggtctgggaacggacacgcggggacacgattccggtttggggtccgggagggcgtcgccgtttcgggcggcaggcgccagcgtaacctccgggggcggcgtgtgggggtgccccaaggagggcgcctcggtcaccccaagcccccccaagcgggttcccccggcaaccccgaaggcggagaggccaagggcccgttcggcgatggccacatcctccatgaccacgtcgctctcggccatgctccgaatagcctgggagacgagcacatccgcggacttgtcagccgcccccacggacatgtacatctgcaggatggtggccatacacgtgtccgccaggcgccgcatcttgtcctgatgggccgccacggccccgtcgatcgtgggggcctcgagcccggggtggtggcgcgccagtcgttctaggttcaccatgcaggcgtggtacgtgcgggccaaggcgcgggccttcacgaggcgtcgggtgtcgtccagggaccccagggcgtcatcgagcgtgatgggggcgggaagtagcgcgttaacgaccaccagggcctcctgcagccgcggctccgcctccgagggcggaacggccgcgcggatcatctcatattgttcctcggggcgcgctccccagccacatatagccccgagaagagaagccatcgcgggcgggtactggcccttgggcgcgcggacgcaatggggcaggaagacgggaaccgcggggagaggcgggcggccgggactcccgtggaggtgaccgcgctttatgctaccgacgggtgcgttattacctcttcgatcgccctcctcacaaactctctactgggggccgagccggtttatatattcagctacgacgcatacacgcacgatggccgtgccgacgggcccacggagcaagacaggttcgaagagagtcgggcgctctaccaagcgtcgggcgggctaaatggcgactccttccgagtaaccttttgtttattggggacggaagtgggtgggacccaccaggcccgcgggcgaacccgacccatgttcgtctgtcgcttcgagcgagcggacgacgtcgccgcgctacaggacgccctggcgcacgggaccccgctacaaccggaccacatcgccgccaccctggacgcggaggccacgttcgcgctgcatgcgaacatgatcctggctctcaccgtggccatcaacaacgccagcccccgcaccggacgcgacgccgccgcggcgcagtatgatcagggcgcgtccctacgctcgctcgtggggcgcacgtccctgggacaacgcggccttaccacgctatacgtccaccacgaggcgcgcgtgctggccgcgtaccgcagggcgtattatggaagcgcgcagagtcccttctggtttcttagcaaattcgggccggacgaaaaaagcctggtgctcaccactcggtactacctgcttcaggcccagcgtctggggggcgcgggggccacgtacgacctgcaggccatcaaggacatctgcgccacctacgcgattccccacgccccccgccccgacaccgtcagcgccgcgtccctgacctcgtttgccgccatcacgcggttctgttgcacgagccagtacgcccgcggggccgcggcggccgggtttccgctttacgtggagcgccgtattgcggccgacgtccgcgagaccagtgcgctggagaagttcataacccacgatcgcagttgcctgcgcgtgtccgaccgtgaattcattacgtacatttacctggcccattttgagtgtttcagccccccgcgcctagccacgcatcttcgggccgtgacgacccacgaccccaaccccgcggccaacacggagcagccctcgcccctgggcagggaggccgtggaacaatttttttgccacgtgcgcgcccaactgaatatcggggagtacgtcaaacacaacgtgaccccccgggagaccgtcctggatggcgatacggccaaggcctacctgcgcgctcgcacgtacgcgcccggggccctgacgcccgcccccgcgtattgcggggccgtggactccgccaccaaaatgatggggcgtttggcggacgccgaaaagctcctggtcccccgcgggtggcccgcgtttgcgcccgccagtcccggggaggatacggcgggcggcacgccgcccccacagacctgcggaatcgtcaagcgcctcctgagactggccgccacggaacaacaggacaccacgcccccggcgatcgcggcgcttatccgtaatgcggcggtgcagactcccctgcccgtctaccggatatccatggtccccacgggacaggcatttgccgcgctggcctgggacgactgggcccgcataacgcgggacgctcgcctggccgaagcggtcgtgtccgccgaagcggcggcgcaccccgaccacggcgcgctgggcaggcggctcacggatcgcatccgcgcccagggccccgtgatgccccctggcggcctggatgccggggggcagatgtacgtgaatcgcaacgagatattcaacggcgcgctggcaatcacaaacatcatcctggatctcgacatcgccctgaaggagcccgtcccctttcgccggctccacgaggccctgggccactttaggcgcggggctctggctgcggttcagctcctgtttcccgcggcccgcgtggaccccgacgcatatccctgttattttttcaaaagcgcatgtcggcccggcccggcgtccgtgggttccggcagcggactcggcgacgacggggactggtttccctgctacgacgacgccggtgatgaggagtgggcggaggacccgggcgccatggacacatcccacgatcccccggacgacgaggttgcctactttgacctgtgccacgaagtcggccccacggcggaacctcgcgaaacggattcgcccgtgtgttcctgcaccgacaagatcggactgcgggtgtgcatgcccgtccccgccccgtacgtcgtccacggttctctaacgatgcggggggtggcacgggtcatccagcaggcggtgctgttggaccgagattttgtggaggccatcgggagctacgtaaaaaacttcctgttgatcgatacgggggtgtacgcccacggccacagcctgcgcttgccgtattttgccaaaatcgcccccgacgggcctgcgtgcggaaggctgctgccagtgtttgtgatcccccccgcctgcaaagacgttccggcgtttgtcgccgcgcacgccgacccgcggcgcttccattttcacgccccgcccacctatctcgcttccccccgggagatccgtgtcctgcacagcctgggtggggactatgtgagcttctttgaaaggaaggcgtcccgcaacgcgctggaacactttgggcgacgcgagaccctgacggaggtcctgggtcggtacaacgtacagccggatgcgggggggaccgtcgaggggttcgcatcggaactgctggggcggatagtcgcgtgcatcgaaacccactttcccgaacacgccggcgaatatcaggccgtatccgtccggcgggccgtcagtaaggacgactgggtcctcctacagctagtccccgttcgcggtaccctgcagcaaagcctgtcgtgtctgcgctttaagcacggccgggcgagtcgcgccacggcgcggacattcgtcgcgctgagcgtcggggccaacaaccgcctgtgcgtgtccttgtgtcagcagtgctttgccgccaaatgcgacagcaaccgcctgcacacgctgtttaccattgacgccggtacgccatgctcgccgtccgttccctgcagcacctctcaaccgtcgtcttgataacggcgtacggcctcgtgctcgtgtggtacaccgtcttcggtcacccccccaacgggggctggcgcaaccacgcccatatctgctacgccaatcttatcgcgggtagggtcgtgcccttccaggtcccacccgacgccatgaatcgtcggatcatgaacgtccacgaggcagttaactgtctggagaccctatggtacacacgggtgcgtctggtggtcgtagggtggttcctgtatctggcgttcgtcgccctccaccaacgccgatgtatgtttggtgtcgtgagtcccgcccacaagatggtggccccggccacctacctcttgaactacgcaggccgcatcgtatcgagcgtgttcctgcagtacccctacacgaaaattacccgcctgctctgcgagctgtcggtccagcggcaaaacctggttcagttgtttgagacggacccggtcaccttcttgtaccaccgccccgccatcggggtcatcgtaggctgcgagttgatgctacgctttgtggccgtgggtctcatcgtcggcaccgctttcatatcccggggggcatgtgcaatcacataccccctgtttctgaccatcaccacctggtgttttgtctccaccatcggcctgacagagctgtattgtattctgcggcggggcccggcccccaagaacgcagacaaggccgccgccccggggcgatccaaggggctgtcgggcgtctgcgggcgctgctgttccatcatcctctcgggcatcgcagtgcgattgtgttatatcgccgtggtggccggggtggtgctcgtggcgcttcactacgagcaggagatccagaggcgcctgtttgatgtatgacgtcacatccaggccggcggaaaccggaacggcatatgcaaattggaaactgtcctgtcttggggcccacccacccgacgcgtcatatgcaaatgaaaatcggtcccccgaggccacgtgtagcctggatcccaacgaccccgcccatgggtcccaattggccgtcccgttaccaagaccaacccagccagcatatccacccccgcccgggtccccgcggaagcggaacggtgtatgtgatatgctaattaaatacatgccacgtacttatggtgtctgattggtccttgtctgtgccggaggtggggcgggggccccgcccggggggcggaacgaggaggggtttgggagagccggccccggcaccacgggtataaggacatccaccacccggccggtggtggtgtgcagccgtgttccaaccacggtcacgcttcggtgcctctccccgattcgggcccggtcgctcgctaccggtgcgccaccaccagaggccatatccgacaccccagccccgacggcagccgacagcccggtcatggcgactgacattgatatgctaattgacctcggcctggacctctccgacagcgatctggacgaggacccacccgagccggcggagagccgccgcgacgacctggaatcggacagcagcggggagtgttcctcgtcggacgaggacatggaagacccccacggagaggacggaccggagccgatactcgacgccgctcgcccggcggtccgcccgtctcgtccagaagaccccggcgtacccagcacccagacgcctcgtccgacggagcggcagggccccaacgatcctcaaccagcgccccacagtgtgtggtcgcgcctcggggcccggcgaccgtcttgctcccccgagcagcacgggggcaaggtggcccgcctccaacccccaccgaccaaagcccagcctgcccgcggcggacgccgcgggcgtcgcaggggtcggggtcgcggtggtcccggggccgccgatggtttgtcggacccccgccggcgtgcccccagaaccaatcgcaacccggggggaccccgccccggggcggggtggacggacggccccggcgccccccatggcgaggcgtggcgcggaagtgagcagcccgacccacccggaggcccgcggacacggggcgtgcgccaagcaccccccccgctaatgacgctggcgattgcccccccgcccgcggacccccgcgccccggccccggagcgaaaggcgcccgccgccgacaccatcgacgccaccacgcggttggtcctgcgctccatctccgagcgcgcggcggtcgaccgcatcagcgagagctttggccgcagcgcacaggtcatgcacgacccctttggggggcagccgtttcccgccgcgaatagcccctgggccccggtgttggcgggccaaggagggccctttgacgccgagaccagacgggtctcctgggaaaccttggtcgcccacggcccgagcctctatcgcacttttgccggcaatcctcgggccgcatcgaccgccaaggccatgcgcgactgcgtgctgcgccaagaaaatttcatcgaggcgctggcctccgccgacgagacgctggcgtggtgcaagatgtgcatccaccacaacctgccgctgcgcccccaggaccccattatcgggacggccgcggctgtgctggataacctcgccacgcgcctgcggccctttctccagtgctacctgaaggcgcgaggcctgtgcggcctggacgaactgtgttcgcggcggcgtctggcggacattaaggacattgcatccttcgtgtttgtcattctggccaggctcgccaaccgcgtcgagcgtggcgtcgcggagatcgactacgcgacccttggtgtcggggtcggagagaagatgcatttctacctccccggggcctgcatggcgggcctgatcgaaatcctagacacacaccgccaggagtgttcgagtcgtgtctgcgagttgacggccagtcacatcgtcgcccccccgtacgtgcacggcaaatatttttattgcaactccctgttttaggtacaataaaaacaaaacatttcaaacaaatcgccccacgtgttgtccttctttgctcatggccggcggggcgtgggtcacggcagatggcgggggtgggcccggcgtacggcctgggtgggcggagggaactaacccaacgtataaatccgtccccgctccaaggccggtgtcatagtgcccttaggagcttcccgcccgggcgcatccccccttttgcactatgacagcgacccccctcaccaacctgttcttacgggccccggacataacccacgtggcccccccttactgcctcaacgccacctggcaggccgaaacggccatacacaccagcaaaacggactccgcttgcgtggccgtgcggagttacctggtccgcgcctcctgtgagaccagcggcacaatccactgctttttctttgcggtatacaaggacacccaccacacccctccgctgattaccgagctccgcaactttgcggacctggttaaccacccgccggtcctacgcgaactggaggataagcgcggggtgcggctgcggtgtgcgcggccgtttagcgtcgggacgattaaggacgtctctgggtccggcgcgtcctcggcgggagagtacacgataaacgggatcgtgtaccactgccactgtcggtatccgttctcaaaaacatgctggatgggggcctccgcggccctacagcacctgcgctccatcagctccagcggcatggccgcccgcgcggcagagcatcgacgcgtcaagattaaaattaaggcgtgatctccaacccccccatgaatgtgtgtaaccccccaaaaaaataaacagccgtaacccaatcaaaccaggcgtggtgtgagtttgtggacccaaagccctcagagacaacgcgacaggccagtatggaccgtgatacttttatttattaactcacaggggcgcttaccgccacaggaataccagaataatgaccaccactatcgcgaccaccccaaatacagcatggcgccccaccacgccacaacagccctgtcgccggtatggggcatgatcagacgagccgcgagccgcgcgttgggccctgtacagctcgcgcgaattgaccctaggaggccgccacgcgcccgagttttgcgttcgtcgctggtcgtcgggcgccaaagccccggacggctgttcggtcgaacgaacggccacgacagtggcataggttggggggtggtccgacatagcctcggtgtacgtcgggaggcccgacaagaggtcccttgagatgtcgggtggggccacaagcctggtttccggaagaaacaggggggttgccaataacccgccagggccaaaactccggcgctgcgcacgtcgttcggcgcggcgccgggcgcgccgagcggctcgctgggcggcttggcgtgagcggccccgctccgacgcctcgccctctccggaggaggttggcggaattggcacggacgacaggggcccagcagagtacggtggaggtgggtccgtgggggtgtccagatcaataacgacaaacggcccctcgttcctaccagacaagctatcgtaggggggcgggggatcagcaaacgcgttccccgcgctccatagacccgcgtcgggttgcgccgcctccgaagccatggatgcgccccaaagccacgactcccgcgcgctaggtccttggggtaagggaaaaggccctactccccatccaagccagccaagttaacgggctacgccttcggggatgggactggcaccccggcggattttgttgggctggtacgcgttgcccaaccgagggccgcgtccacgggacgcgccttttataaccccgggggtcattcccaacgatcacatgcaatctaactggctcccctctccccccctctcccctctccccccctctcccctctccccccctctcccctctccccccctctcccctctccccccctctcccctctccccccctctcccctctccccccctctcccctctccccccctctcccctctccccccctctcccctctccccccctctcccctctccccccctgctctttccccgtgacacccgacgctggggggcgtggctgccgggaggggccgcggatgggcggggcctactcggtctcccgcccccgcccccgaaccgccccgccggccttgcccccctttgatcccctgctacccccaacccgtgctcgtggtgcgggttgggtggggggggggagtgtgggcgggggtgtgcgggaggtgtcggtggtggtggtggtggtaggaatggtggtgaggggggggggcgctggttggtcaaaaaagggagggacgggggccggcagaccgacggcgacaacgctccccggcggccgggtcgcggctcttacgagcggcccggcccgcgctcccaccccccgggccgtgtccttgctttccccccgtctccccccccctccttctcctcctcctcctcctcgtttttccaaaccccgcccacccggcccggcccggcccggccaccgccgcccacccacccacctcgggagacccagccccggtcccccgttccccgggggccgttatctccagcgccccgtccggcgcgccgccccccgccgctaaaccccatcccgcccccgggaccccacatataagcccccagccacacgcaagaacagacacgcagaacggctgtgtttatttaaataaaccgatgtcggaataaacaaacacaaacacccgcgacggggggacggagggaggggggtgacgggggacgggaacagccacaaaaaacacccacaaaaaaaaacagccacccccgacacccccccccacccccagtctcttcgccttttcccccccaccccacgcccccactgagcccggtcgatcgacgagcacccccgcccccgcccctgccccggcgacccccggcccgcacgatcccgacaacaataacaaccccaacggaaagcggcggggtgtgggggggggcgaggaacaaccgaggggaacgggggatggaaggacgggaagtggaagtcctgatacccatcctacacccccctgccttccaccctccggccccccgcgagtccacccgccggccggctaccgagaccgaacacggcggccgccgcagccgccgcagccgccgccgacaccgcagagccggcgcgcgcacacacaagcggcagaggcagaaaggcccagagtcattgtttatgtggccgcgggccagcagacggcccgcgacacccccccccccgcccgtgtgggtatccggccccccgccccgcgccggtccattaagggcgcgcgtgcccgcgagatatcaatccgttaagtgctctgcagacaggggcaccgcgcccggaaatccattaggccgcagacgaggaaaataaaattacatcacctacccacgtggtgctgtggcctgtttttgctgcgtcatctgagcctttataaaagcgggggcgcggccgtgccgatcgcgggtggtgcgaaagactttccgggcgcgtccgggtgccgcggctctccgggcccccctgcagccggggcggccaaggggcgtcggcgacatcctccccctaagcgccggccggccgctggtctgttttttgttttccccgtttcgggggtggggggggttgcggtttctgtttctttaacccgtctggggtgtttttcgttccgtcgccggaatgtttcgttcgtctgtcccctcacggggcgaaggccgcgtacggcccgggacgagggggcccccgaccgcggcggtccgggccccgtccgggcccgctcgccggcacgcgacgcgaaaaaggccccccggaggcttttccgggttcccggcccggggcctgagataaacaatcggggttaccgccaacggccggcccccgtggcggcccggcccggggccccggcggacccaaggggccccggcccggggccccacaacggcccggcgcatgcgctgtggtttttttttctcggtgttttgtcgggctccgtcgcctttcctgttctcgcttctccccccccccccttcttcacccccagtaccctcctccctcccttcctcccccgttatcccactcgtcaagggcgccccggtgtggttcaacaaagacgccgcgtttccaggtaggttagacacctgcttctccccaatagaggggggggacccaaacgacagggggcgccccagaggctaaggtcggccacgccactcgcgggtgggctcgtgttacagcacaccagcccgttcttttccccccctcccacccttagtcagactctgttacttacccgtccgaccaccaactgcccccttatctaagggccggctggaagaccgccagggggtcggccggtgtcgctgtaaccccccacgccaatgacccacgtactccaagaaggcatgtgtcccaccccgcctgtgtttttgtgcctggctctctatgcttgggtcttactgccgggggggggggagtgcgggggagggggggtgtggaaggaaatgcacggcgcgtgtgtaccccccctaaagttgttcctaaagcgaggatatggaggagtggcgggtgccgggggaccggggtgatctctggcacgcgggggtgggaagggtcgggggaggggggatggggtaccggcccacctggccgacgcgggtgcgcgtgcctctgcacaccaaccccacgtcccccggcggtctctaagaagcaccgccccccctccttcataccaccgagcatgcctgggtgtgggttggtaaccaacacgcccatcccctcgtctcctgtgattctctggctgcaccgcattcttgttttctaactatgttcctgtttctgtctccccccccacccctccgccccaccccccaacacccacgtctgtggtgtggccgacccccttttgggcgccccgtcccgccccgccacccctcccgtcctttgttgccctatagtgtagttaacccccccccgccctttgtggcggccagaggccaggtcagtccgggcgggcaggcgctcgcggaaacttaacacccacacccaacccactgtggttctggctccatgccagtggcaggatgctttcggggatcggtggtcaggcagcccgggccgcggctctgtggttaacaccagagcctgcccaacatggcacccccactcccacgcacccccactcccacgcacccccactcccacgcacccccactcccacgcacccccactcccacgcacccccactcccacgcacccccactcccacgcacccccactcccacgcacccccactcccacgcacccccgagatccatccaacacagacagggaaaagatacaaaagtaaacctttatttcccaatagacagcaaaaatcccctgagttttttattagggccaacactaaagacccgctggtgtgtggtgcccgtgtctttcacttttcccctccccgacacggattggctggtgtagtgggcgcggccagagaccacccagcgcccgacccccccctccccacaaacacggggggcgtcccttattgttttccctcgtcccgggtcgacgccccctgctccccggaccacgggtgccgagaccgcaggctgcggaagtccagggcgcccactagggtgccctggtcgaacagcatgttccccacgggggtcatccagaggctgttccactccgacgcgggggccgtcgggtactcggggggcatcacgtggttacccgcggtctcggggagcagggtgcggcggctccagccggggaccgcggcccgcagccgggtcgccatgtttcccgtctggtccaccaggaccacgtacgccccgatgttccccgtctccatgtccaggatgggcaggcagtcccccgtgatcgtcttgttcacgtaaggcgacagggcgaccacgctagagacccccgagatgggcaggtagcgcgtgaggccgcccgcgggggcggccccggaagtctccgcgtggcgcgtcttccgggcacacttcctcggcccccgcggcccagaagcagcgcgggggccgagggaggtttcctcttgtctccctcccagggcaccgacggccccgcccgaggaggcggaagcggaggaggacgcggccccggcggcggaagaggcggcccccgcgggagtcggggccgaggaggaagaggcagaggaggaagaggcggaggccgccgaggacgtcaggggggtcccgggcccaccctggccgcgcccccccggccctgagtcggagggggggtgcgtcgccgccctcttggcccctgccggcgcgagggggggacgcgtggactggggggaggggttttcctggcccgacccgcgcctcttcctcggacgcaccgccgcctcctgctcgacagaggcggcggaggggagcgggggggcgccggagggggcggcgccgcgggagggcccgtgtccaccctccacgcccggcccccccgagccgcgcgccaccgtcgcacgcgcccggcacagactctgttcttggttcgcggcctgagccagggacgagtgcgactggggcacacggcgcgcgtccgcgggggccggggcgcgggggccgggccccggaggcggcgctcgcacgcacggggccacggccgcgcgggggcgcgcgggtcccgacgcggccgaggacgcggtgggcccggggcggggggcggagcctggcatgggcgccgcggggggcctgtggggagaggccgggggggagtcgctgatcactatggggtctctgttgtttgcaaggggggcgggtctgttgacaagggggcccgtccggcccctcggccgccccgcctccgcttcaacaaccccaaccccaaccccaacccccccggaggggccagacgccccccgcggcgccgcggctcgcgactggcgggagccgccgccgccgccgctgctgttggtggtggtgttggtgttactgctgccgtgtggcccgatgggcgccgaggggggcgctgtccgagccgcggccggctggggggctgcgtgagacgccccgcccgtcacggggggcgcggcggcgcctctgcgtgggggggcgcggggcgtccggcggggggcgggcggtacgtagtctgctgcaagagacaacggggggcgcgatcaggttacgccccctcccaggccctccctttccgcgcccgccctttcctcgcccccccgcccgcctattcctccctcccccctcctcctcctcctcccccagggtcctcgccgcccccccgcctcaccgtcgtccaggtcgtcgtcatcctcgtccgtggtgggctcagggtgggtgggcgacagggccctcaccgtgtgcccccccagggtcaggtaccgcggggcgaaccgctgattgcccgtccagataaagtccacggccgtgcccgccctgacggcctcctcggcctccatgcgggtctgggggtcgttcacgatcgggatggtgctgaacgacccgctgggcgtcacgcccactatcaggtacaccagcttggcgttgcacagcgggcaggtgttgcgcaattgcatccaggttttcatgcacgggatgcagaagcggtgcatgcacgggaaggtgtcgcagcgcaggtggggcgcgatctcatccgtgcacacggcgcacacgtcgccctcgtcgctccccccgtcctctcgagggggggcgcccccgcaactgccggggtcttcctcgcggggggggctcccccccgagaccgcccccccatccacgccctgcggccccagcagccccgtctcgaacagttccgtgtccgtgctgtccgcctcggaggcggagtcgtcgtcatggtggtcggcgtccccccgcccccccacttcggtctccgcctcagagtcgctgctgtccggcaggtctcggtcgcagggaaacacccagacatccggggcgggctaaggggaaaaaaaggggggcgggtaagaatggggggatttcccgcgtcaatcagcgcccacgagttccccctctccccccccccgcctcacaaagtcctgcccccctgctggcctcggaagaggggggagaaaggggtctgcaaccaaaggtggtctgggtccgtcctttggatcccgacccctcttcttccctcttctcccgccctccagacgcaccggagtcgggggtcccacggcgtcccccaaatatggcgggcggctcctccccacccccctagatgcgtgtgagtaagggggccctgcgtatgagtcagtggggaccacgccccctaacacggcgaccccggtccctgtgtgtttgttgtgggggcgtgtctctgtgtatgagtcagggggtcccacggcgaccccgggccctgcgtctgagtcaaaggggccatgtgtatgtgttggggggtctgtatatataaagtcagggggtcacatggcgacccccaacagggcgaccccggtccctgtatatatagggtcagggggttccgcgccccctaacatggcgcccccggtccctgtatatatagtgtcacggggttccacgccccctaacatggcgcccggctcccgtgtatgagtgggggtcccccaacatggcggccggttccagtgtaagggtcgggggtcccccaacatggcgccccccaatatggcgccccccaatatggcgccccagacatggcgcccggcccctcacctcgcgctgggggcggccctcaggccggcgggtactcgctccggggcggggctccatgggggtcgtatgcggttggagggtcgcggacggagggtccctgggggtcgcaacgtaggcggggcttctgtggtgatgcggagagggggcggcccgagtctgcctggctgctgcgtctcgctccgagtgccgaggtgcaaatgcgaccagactgtcgggccagggctaacttataccccacgcctttcccctccccaaaggggcggcagtgacgattcccccaatggccgcgcgtcccaggggaggcaggcccaccgcggggcggccccgtccccggggaccaacccggcgcccccaaagaatatcattagcatgcacggcccggcccccgatttgggggaccaacccggtgtcccccaaagaaccccattagcatgcccctcccaccgacgcaacaggggcttggcctgcgtcggtgccccggggcttcccgccttcccgaagaaactcattaccatacccggaaccccaggggaccaatgcgggttcattgagcgacccgcgggccaatgcgcgaggggccgtgtgttccgccaaaaaagcaattagcataacccggaaccccaggggagtggttacgcgcggcgcgggaggcggggaataccggggttgcccattaagggccgcgggaattgccggaagcgggaagggcggccggggccgcccattaatgagtttctaattaccataccgggaagcggaacaaggcctcttgtaagtttttaattaccataccgggaagtgggcggcccggcccactgggcggtaactcccgcccagtgggccgggccccgaagactcggcggacgctggttggccgggccccgccgcgctggcggccgccgattggccagtcccgccctccgagggcgggcccgcctcgggggcgggccggctcccagcgtatatatgcgcggctcctgccatcgtctctccggagagcggcttggtgcggagctcccgggagctccgcggaagacccaggccgcctcgggtgtaacgttagaccgagttcgccgggccggctccgcgggccagggcccgggcacgggcctcgggccccaggcacggcccgatgaccgcctcggcctccgccacccggcgccggaaccgagcccggtcggcccgctcgcgggcccacgagccgcggcgcgccaggcgggcggccgaggcccagaccaccaggtggcgcacccggacgtggggcgagaagcgcacccgcgcgggggtcgcgggggtcgcgggggtcgcgggggtcgcgggggtcgcggggggctccggcgccccctccccgcccgcgcgtcgcaggcgcaggcgcgccaggtgctctgcggtgacgcgcaggcggagggcgaggcgcggcggaaggcggaaggggcgtgagggggggtgggaggggttagccccgccccccgggcccgcgccgggcggtggggaccgggggcggggggcggcggcggtgggccgggcctctggcgccggctcgggcggggggctgtccggccagtcgtcgtcatcgtcgtcgtcggacgcggactcgggaacgtggagccactggcgcagcagcagcgaacaagaaggcgggggcccactggcggggggcggcggcggggcggccgcgggcgcgctcctgaccgcgggttccgagttgggcgtggaggttacctgggactgtgcggttgggacggcgcccgtgggcccgggcggccgggggcggcgggggccgcgatggcggcggcggcgggccatggagacagagagcgtgccggggtggtagagtttgacaggcaagcatgtgcgtgcagaggcgagtagtgcttgcctgtctaactcgctcgtctcggccgcggggggcccgggctgcgccgccgcgctttaaagggccgcgcgcgacccccggggggtgtgtttcggggggggcccgttttccgctcctccccccgctcctccccccgctcctccccccgctcctccccccgctcctccccccgctcctccccccgctcctccccccgctcctccccccgctcctccccccgctcctccccccgctcctccccccgctcctccccccgctcctccccccgctcctccccccgctcctccccccgctcctccccccgctcctccccccgctcctccccccgctccccaacgcccgccgcgcgcgcgcacgccgcccggaccgccgcccgccttttttgcgcgccgccccgcccgcggggggcccgggctgccacaggtgtaacaacaccaacagaacaccaacagcacggcgcaccggcgactccggttcctcatccacacgtcacacgtcacgtcatccaccacacctgcccaccaacacaactcacagcgacaactcaccgcgcaacaactcctgttcctcatccacacgtcaccgcgcaccccccgctcctccagacgtcccccagcgcaacacgccgctcctgtcacacaccaccgccccagccctccccagccccagccctccccagccccagccctccccggccccagccctccccggccccagccctccccggccccagccctccccggccccagccctccccggccccagccctccccggccccagccctccccggccgcgtcccgcgctccctcgggggggttcgggcatctctacctcagtgccgccaatctcaggtcagagatccaaaccctccgggggcgcccgcgcaccaccaccgcccctcgccccctcccgcccctcgccccctcccgcccctcgccccctcccgcccctcgccccctcccgcccctcgccccctcccgcccctcgccccctcccgcccctcgccccctcccgcccctcgccccctcccgcccctcgccccctcccgcccctcgccccctcccgcccctcgccccctcccgcccctcgccccctcccgcccctcgccccctcccgcccctcgccccctcccgcccctcgccccctcccgcccctcgccccctcccgcccctcgccccctcccgcccctcgccccctcccgcccctcgccccctcccgcccctcgaaataaacaacgctactgcaaaactaaatcaggtcgttgtcgtttattgcgtcttcgggtttcgcaagcgccccgccccgtcccggcccgttacagcaccccgtccccctcgaacgcgccgccgtcgtcgtcgtcccaggcgccttcccagtccacaacttcccgtcgcgggggcgtggccaagcccgcctccgcccccagcacctccacggcccccgccgccgccagcacggtgccgctgcggcccgtggccgaggcccagcgaatcccgggcaacgccggcggcagggcccccgggccgtcgtcgtcgtcgtcgccgccgcgcagcaccagcgggggggcgtcgtcgtcgggctccagcagggcgcgggcgcaaaagtccctccgcggcccgcgccaccgggccgggccggcgcgcaccgcctcgcgccccagcgccacgtacacgggccgcagcggcgcgcccaggccccagcgcgcgcaggcgcggtgcgagtgggcctcctcctcgcagaagtccggcgcgccgggcgccatggcgtcggtggtccccgaggccgccgcccggccgtccagcgccggcagcacggcccggcggtactcgcgcggggacatgggcaccggcgtgtccgggccgaagcgcgtgcgcacgcggtagcgcacgttgccgccgcggcacaggcgcagcggcggcgcgtcggggtacaggcgcgcgtgcgcggcctccacgcgcgcgaagacccccgggccgaacacgcggcccggggccagcaccgtgcggcgcaggtcccgcgccgccggccagcgcacggcgcactgcacggcgggcagcaggtcgcacgccaggtaggcgtgctgccgcgacaccgcgggcccgtcggcgggccagtcgcaggcgcgcacggtgttgaccacgatgagccgccggtcgccggcgctggcgagcagccccagaaactccacggccccggcgaaggccaggtcccgcgtggacagcagcagcacgccctgcgcgcccagcgccgacacgtcgggggcgccggtccagttgcccgcccaggcggccgtgtccggcccgcacagccggttggccagggccgccagcaggcaggacagcccgccgcgctcggcggaccactccggcggcccccccgaggccccgccgccggccaggtcctcgcccggcagcggcgagtacagcaccaccacgcgcacgtcctcggggtcggggatctggcgcatccaggccgccatgcggcgcagcgggcccgaggcgcgcagggggccaaagaggcggcccccggcggccccgtgggggtgggggttatcgtcgtcgtcgccgccgccgcacgcggcctgggcggcggcggcgggcccggcgcaccgcgcggcgatcgaggccagggcccgcgggtcaaacatgagggccggtcgccaggggacggggaacagcgggtggtccgtgagctcggccacggcgcgcggggagcagtaggcctccagggcggcggccgcgggcgccgccgtgtggctgggccccgggggctgccgccgccagccgcccagggggtcggggccctcggcgggccggcgcgacagcgccacggggcgcgggcgggcctgcgccgcggcggcccggggcgccgcgggctgggcgggggcgggctcgggccccgggggcgtggaggggggcgcggggaggggggcgcgggcgtccgagccgggggcgtccgcgccgctcttcttcgtcttcgggggtcgcgggccgccgcctccgggcggccgggccgggccgggactcttgcgcttgcgcccctcccgcggcgcggcggaggcggcggcggccgccagcgcgtcggcggcgtccggtgcgctggcggccgccgccagcagggggcgcaggctctggttctcaaacagcaggtccgcggcggcggcggccgcggagctcggcaggcgcgggtcccgcggcagcgcggggcccagggccccggcgaccaggctcacggcgcgcacggcggccacggcggcctcgctgccgccggccacgcgcaggtccccgcgcaggcgcatgagcaccagcgcgtcgcgcacgaaccgcagctcgcgcagccacgcgcgcaggcggggcgcgtcggcgtgcggcggcggcggggaagcggggcccgcgggtccctccggccgcggggggctggcgggccgggccccggccagccccgggacggccgccaggtcgccgtcgaagccctcggccagcgcctccaggatcccgcggcaggcggccaggcactccacggccacgcggccggcctgggcgcggcgcccggcgtcgtcgtcggcgtcggcgtggcgggcggcgtcggggtcgtcgccccccgcgggggaggcgggcgcggcggacagccgccccagggcggcgaggatccccgcggcgccgtacccggcgggcaccgcgcgctcgcccggtgcggcggcggcggcgacgacggcggcggcgaccccctcgtcatctgcgccggcgccggggctccccgcggcccccgtcagcgccgcgttctcgcgcgccaacaggggcgcgtaggcgcggcgcaggctggtcagcaggaagcccttctgcgcgcggtcgtatcggcggctcatggccacggcggccgccgcgtgcgccaggccccagccgaagcggccggccgccatggcgtagcccaggtggggcacggcccgcgccacgctgccggtgatgaaggagctgctgttgcgcgcggcgcccgagatccggaagcaggcctggtccagcgccacgtccccggggaccacgcgcgggttctggagccaccccatggcctccgcgtccggggtgtacagcagccgcgtgatcagggcgtactgctgcgcggcgtcgcccagctcgggcgcccacacggccgccggggcgcccgaggcctcgaaccggcgtcgcgcctcctccgcctcgggcgccccccagaggcccgggcggctgtcgcccaggccgccgtacagcacccgccccgggggcgggggcccggcgccgggccacggctccccgctgacgtacccgtcgcgatagcgcgcgtagaaggcgccggaggccgcgtcggcgtccagctcgacccgccggggctgcccggccgtgaagcggcccgtggcgtcgcggccggccaccgccgcgcgggcccggcggcgctcgatgcggcccgcggaggccgcgggggtcctcgccgccgcccggggcttgggcgcggcctcggagagggggggtggcccgggcgggggcggcgtccgcccgggggcttccggcgccgcgctcgacggaccccgcccgacggcccgcgcctcgcgtgcgcggtcggccgcgtcgttgccgtcgtcgtcctcgtcctcgtcggacgacgaggacgaagaggatgcggacgacgaggacgaggacccggagtccgacgaggtcgatgacgccgatggccgccgccggccgtgacgacgtctccgcggcggctgggccggcgggcgcggcgacaggcggtccgtggggtccggatacgcgccgcgtagcggggcctcccgtgcgcggccccgggccggggcccggtcgccggcggcgtcggctgcgtcgtcgtactcgtccccgtcatcgtcgtcggctcgaaaggcgggggtccggggcggcgaggccgcggggtcgggcgtcgggatcgtccggacggcctcctctaccatggaggccagcagggccagctgtcgcggcgagacggcgtccccggcgtcctcgccggcgtcggtgcccgccgcgggggccctcccgtcccgccgggcgtcgtcgaggtcgtgggggtggtcggggtcgtggtcggggtcgtccccgccctcctccgtctccgcgccccacccgagggccccccgctcgtcgcggtctgggctcggggtgggcggcggcccgtcggtggggcccggggagccggggcgctgcttgttctccgacgccatcgccgatgcggggcgatcctccggggatacggctgcgacggcggacgtagcacggtaggtcacctacggactctcgatggggagggggcgagacccacggaccccgacgacccccgccgtcgacgcggaactagcgcggaccggtcgatgcttgggtgggaaaaaggacagggacggccgatccccctcccgcgcttcgtccgcgtatcggcgtcccggcgcggcgagcgtctgacggtctgtctctggcggtcccgcgtcgggtcgtggatccgtgtcggcagccgcgctccgtgtggacgatcggggcgtcctcgggctcatatagtcccaggggccggcgggaaggaggagcagcggaggccgccggccccccgccccccaggcgggcccgccccgaacggaattccattatgcacgaccccgccccgacgccggcacgccgggggcccgtggccgcggcccgttggtcgaacccccggccccgcccatccgcgccatctgccatgggcggggcgcgagggcgggtgggcccgcgccccgccccgcatggcatctcattaccgcccgatccggtggtttccgcttccgttccgcatgctaacgaggaacgggccgggggcggggcccgggccccgacttcccggttcggcggtaatgagatacgagccccgcgcgcccgttggccgtccccgggcccccggtcccgcccgccggacgttgggaccaacgggacggcgggcggcccaagggccgcccgccttgccgcccccccattggccggcgggcgggaccgccccaagggggcggggccgccgggtaaaagaagtgagaacgcgaagcgttcgcacttcgtcccaatatatatatattattagggcgaagtgcgagcactggcgccgtgcccgactccgcgccggccccgggggcgggcccgggcggcggggggcgggtctctccggcgcacataaaggcccggcgcgaccgacgcccgcagacggcgccggccacgaacgacgggagcggctgcggagcacgcggaccgggagcgggactcgcagagggccgtcggagcggacggcgtcggcatcgcgacgccccggctcgggatcgggatcgcatcggaaagggacacgcggaaagacccacccaccccacccacgaaacacaggggacgcaccccgggggcctccgacgacagaaacccaccggtccgcctttgtgcacgggtaagcaccttgggtgggcggaggagggggggacgcgggggcggaggaggggggacgcgggggcggaggaggggggacgcgggggcggaggaggggggacgcgggggcggaggaggggggacgcgggggcggaggagggggctcacccgcgttcgtgccttcccgcaggaggaacgtcctcgtcggggcgaccggcggcgaccgttgcgtggaccgcttcctgctcgtcgggcggggggaagccactgtggtcctccgggacgttttctggatggccgacatttccccaggcgcttttgcgccttgtgtaaaagcgcggcgtcccgctctccgatccccgcccctgggcacgcgcaagcgcaagcgcccttcccgccccctctcatcggagtctgaggtagaatccgatacagccttggagtctgaggtcgaatccgagacagcatcggattcgaccgagtctggggaccaggatgaagccccccgcatcggtggccgtagggccccccggaggcttggggggcggttttttctggacatgtcggcggaatccaccacggggacggaaacggatgcgtcggtgtcggacgaccccgacgacacgtccgactggtcttatgacgacattcccccacgacccaagcgggcccgggtaaacctgcggctcacgagctctcccgatcggcgggatggggttatttttcctaagatggggcgggtccggtctacccgggaaacgcagccccgggcccccaccccgtcggccccaagcccaaatgcaatgctacggcgctcggtgcgccaggcccagaggcggagcagcgcacgatggacccccgacctgggctacatgcgccagtgtatcaatcagctgtttcgggtcctgcgggtcgcccgggacccccacggcagtgccaaccgcctgcgccacctgatacgcgactgttacctgatgggatactgccgagcccgtctggccccgcgcacgtggtgccgtttgctgcaggtgtccggcggaacctggggcatgcacctgcgcaacaccatacgggaggtggaggctcgattcgacgccaccgcggaacccgtgtgcaagcttccttgtttggagaccagacggtacggcccggagtgtgatcttagtaatctcgagattcatctcagcgcgacaagcgatgatgaaatctccgatgccaccgatctggaggccgccggttcggaccacacgctcgcgtcccagtccgacacggaggatgccccctcccccgttacgctggaaaccccagaaccccgcgggtccctcgctgtgcgtctggaggatgagtttggggagtttgactggaccccccaggagggctcccagccctggctgtctgcggtcgtggccgataccagctccgtggaacgcccgggcccatccgattctggggcgggtcgcgccgcagaagaccgcaagtgtctggacggctgccggaaaatgcgcttctccaccgcctgcccctatccgtgcagcgacacgtttctccggccgtgagtccggtcgccccgacccccttgtatgtccccaaataaaagaccaaaatcaaagcgtttgtcccagcgtcttaatggcgggaagggcggagagaaacagaccacgcgtacatggggggtgtttgggggtttattgacatcggggctacagggtggtaaccggatagcagatgtgaggaagtctgggccgttcgccgcgaacggcgatcagagggtccgtttcttgcggaccacggcccggtgatgtgggttgctcgtctgggatctcgggcatgcccatacacgcacaacacggacgccgcaccggatgggacgtcgtaagggggcctggggtagctgggtggggtttgtgcagagcaatcagggaccgcagccagcgcatacaatcgcgctcccgtccgtttgtcccgggcagtaccacgccgtactggtattcgtaccggctgagcagggtctccagggggtggttgggggccgcggggaacggggtccacgccacggtccactcgggcaaaaaccgagtcggcacggcccacggttctcccacccacgcgtctggggtcttgatggcgataaatcttaccccgagccggattttttgggcgtattcgagaaacggcacacacagatccgccgcgcctaccacccacaagtggtagaggcgaggggggctgggttggtctcggtgcagcagtcggaagcacgccacggcgtccacgacctcggtgctctccaaggggctgtcctccgcaaacaggcccgtggtggtgtttggggggcagcgacaggacctagtgcgcacgatcgggcgggtgggtttgggtaagtccatcagcggctcggccaaccgtcgaaggttggccggacgaacgacgaccggggtacccaggggttctgatgccaaaatgcggcactgcctaaacaggaagctccacagggccgggcttgcgtcgacggaagtccggggcagggcgttgttctggtcaaggagggtcattacgttgacgacaacaacgcccatgttggtatattacaggcccgtgtccgatttggggcacttgcagatttgtaaggccacgcacggcggggagacaggccgacgcgggggctgctctaaaaatttaagggccctacggtccacagacccgccttcccgggggggcccttggagcgaccggcagcggaggcgtccgggggaggggagggtgatttacgggggggtaggtcagggggtgggtcgtcaaactgccgctccttaaaaccccggggcccgtcgttcggggtgctcgttggttggcactcacggtgcggcgaatggcctgtcgtaagttttgtcgcgtttacgggggacagggcaggaggaaggaggaggccgtcccgccggagacaaagccgtcccgggtgtttcctcatggccccttttataccccagccgaggacgcgtgcctggactccccgcccccggagacccccaaaccttcccacaccacaccacccggcgatgccgagcgcctgtgtcatctgcaggagatcctggcccagatgtacggaaaccaggactaccccatagaggacgaccccagcgcggatgccgcggacgatgtcgacgaggacgccccggacgacgtggcctatccggaggaatacgcagaggagctttttctgcccggggacgcgcccggtccccttatcggggccaacgaccacatccctcccccgtgtggcgcatctccccccggtatacgacgacgcagccgggatgagattggggccacgggatttaccgcggaagaactggacgccatggacagggaggcggctcgagccatcagccgcggcggcaagcccccctcgaccatggccaagctggtgactggcatgggctttacgatccacggagcgctcaccccaggatcggaggggtgtgtctttgacagcagccacccagattacccccaacgggtaatcgtgaaggcggggtggtacacgagcacgagccacgaggcgcgactgctgaggcgactggaccaccccgcgatcctgcccctcctggacctgcatgtcgtctccggggtcacgtgtctggtcctccccaagtaccaggccgacctgtatacctatctgagtaggcgcctgaacccgctgggacgcccgcagatcgcagcggtctcccggcagctcctaagcgccgttgactacattcaccgccagggcattatccaccgcgacattaagaccgaaaatatttttattaacacccccgaggacatttgcctgggggactttggtgccgcgtgcttcgtgcagggttcccgatcaagccccttcccctacggaatcgccggaaccatcgacaccaacgcccccgaggtcctggccggggatccgtataccaccaccgtcgacatttggagcgccggtctggtgatcttcgagactgccgtccacaacgcgtccttgttctcggccccccgcggccccaaaaggggcccgtgcgacagtcagatcacccgcatcatccgacaggcccaggtccacgttgacgagttttccccgcatccagaatcgcgcctcacctcgcgctaccgctcccgcgcggccgggaacaatcgcccgccgtacacccgaccggcctggacccgctactacaagatggacatagacgtcgaatatctggtttgcaaagccctcaccttcgacggcgcgcttcgccccagcgccgcagagctgctttgtttgccgctgtttcaacagaaatgaccgcccccagggggcggtgctgtttgcgggttggcacaaaaagaccccgacccgcgtctgtggtgtttttggcatcatgtcgccgggcgccatgcgtgccgttgttcccattatcccattccttttggttcttgtcggtgtatcgggggttcccaccaacgtctcctccaccacccaaccccaactccagaccaccggtcgtccctcgcatgaagcccccaacatgacccagaccggcaccaccgactctcccaccgccatcagccttaccacgcccgaccacacaccccccatgccaagtatcggactggaggaggaggaagaggaggagggggccggggacggcgaacatcttgaggggggagatgggacccgtgacaccctaccccagtccccgggcccagccttcccgttggctgaggacgtcgagaaggacaaacccaaccgtcccgtagtcccatcccccgatcccaacaactcccccgcgcgccccgagaccagtcgcccgaagacaccccccaccattatcgggccgctggcaactcgccccacgacccgactcacctcaaagggacgacccttggttccgacgcctcaacataccccgctgttctcgttcctcactgcctcccccgccctggacaccctcttcgtcgtcagcaccgtcatccacaccttatcgtttttgtgtattggtgcgatggcgacacacctgtgtggcggttggtccagacgcgggcgacgcacacaccctagcgtgcgttacgtgtgcctgccgtccgaacgcgggtagggtatggggcgggggatggggagagcccacacgcggaaagcaagaacaataaaggcggtggtatctagttgatatgcatctctgggtgtttttggggtgtggcggacgcggggcggtcattggacggggtgcagttaaatacatgcccgggacccatgaagcatgcgcgacttccgggcctcggaacccacccgaaacggccaacggacgtctgagccaggcctggctatccggagaaacagcacacgacttggcgttctgtgtgtcgcgatgtctctgcgcgcagtctggcatctggggcttttgggaagcctcgtgggggctgttcttgccgccacccatcggggacctgcggccaacacaacggaccccttaacgcacgccccagtgtcccctcaccccagccccctggggggctttgccgtccccctcgtagtcggtgggctgtgcgccgtagtcctgggggcggcgtgtctgcttgagctcctgcgtcgtacgtgccgcgggtgggggcgttaccatccctacatggacccagttgtcgtataatttcccccccccccccccttctccgcatgggtgatgtcgggtccaaactcccgacaccaccagctggcatggtataaatcaccggtgcgccccccaaaccatgtccggcagggggatgggggggcgaatgcggagggcacccaacaacaccgggctaaccaggaaatccgtggccccggcccccaataaagatcgcggtagcccggccgtgtgacactatcgtccataccgaccacaccgacgaatcccctaagggggaggggccattttacgaggaggaggggtataacaaagtctgtctttaaaaagcaggggttagggagttgttcggtcataagcttcagcgcgaacgaccaactaccccgatcatcagttatccttaaggtctcttttgtgtggtgcgttccggtatggggggggctgccgccaggttgggggccgtgattttgtttgtcgtcatagtgggcctccatggggtccgcggcaaatatgccttggcggatgcctctctcaagatggccgaccccaatcgctttcgcggcaaagaccttccggtcctggaccagctgaccgaccctccgggggtccggcgcgtgtaccacatccaggcgggcctaccggacccgttccagccccccagcctcccgatcacggtttactacgccgtgttggagcgcgcctgccgcagcgtgctcctaaacgcaccgtcggaggccccccagattgtccgcggggcctccgaagacgtccggaaacaaccctacaacctgaccatcgcttggtttcggatgggaggcaactgtgctatccccatcacggtcatggagtacaccgaatgctcctacaacaagtctctgggggcctgtcccatccgaacgcagccccgctggaactactatgacagcttcagcgccgtcagcgaggataacctggggttcctgatgcacgcccccgcgtttgagaccgccggcacgtacctgcggctcgtgaagataaacgactggacggagattacacagtttatcctggagcaccgagccaagggctcctgtaagtacgccctcccgctgcgcatccccccgtcagcctgcctgtccccccaggcctaccagcagggggtgacggtggacagcatcgggatgctgccccgcttcatccccgagaaccagcgcaccgtcgccgtatacagcttgaagatcgccgggtggcacgggcccaaggccccatacacgagcaccctgctgcccccggagctgtccgagacccccaacgccacgcagccagaactcgccccggaagaccccgaggattcggccctcttggaggaccccgtggggacggtggcgccgcaaatcccaccaaactggcacataccgtcgatccaggacgccgcgacgccttaccatcccccggccaccccgaacaacatgggcctgatcgccggcgcggtgggcggcagtctcctggcagccctggtcatttgcggaattgtgtactggatgcgccgccgcactcaaaaagccccaaagcgcatacgcctcccccacatccgggaagacgaccagccgtcctcgcaccagcccttgttttactagatacccccccttaatgggtgcgggggggtcaggtctgcggggttgggatgggaccttaactccatataaagcgagtctggaaggggggaaaggcggacagtcgataagtcggtagcgggggacgcgcacctgttccgcctgtcgcacccacagctttttttgcgaaccgtcccgttccgggatgccgtgccgcccgttgcagggcctggtgctcgtgggcctctgggtctgtgccaccagcctggttgtccgtggccccacggtcagtctggtatcaaactcatttgtggacgccggggccttggggcccgacggcgtagtggaggaagacctgcttattctcggggagcttcgctttgtgggggaccaggtcccccacaccacctactacgatggggtcgtagagctgtggcactaccccatgggacacaaatgcccacgggtcgtgcatgtcgtcacggtgaccgcgtgcccacgtcgccccgccgtggctttcgccctgtgtcgcgcgaccgacagcactcacagccccgcatatcccaccctggagctgaatctggcccaacagccgcttttgcgggtccggagggcgacgcgtgactatgccggggtgtacgtgttacgcgtatgggtcggggacgcaccaaacgccagcctgtttgtcctggggatggccatagccgccgaagggactctggcgtacaacggctcggcccatggctcctgcgacccgaaactgcttccgtattcggccccgcgtctggccccggcgagcgtataccaacccgcccctaacccggcctccaccccctcgaccaccacctccaccccctcgaccaccacctccaccccctcgaccaccatccccgctccccaagcatcgaccacacccttccccacgggagacccaaaaccccaacctcacggggtcaaccacgaacccccatcgaatgccacgcgagcgacccgcgactcgcgatacgcgctaacggtgacccagataatccagatagccatccccgcgtccattatagccctggtgtttctggggagctgtatttgctttatacacagatgtcaacgccgctaccgacgctcccgccgcccgatttacaacccccagatacccactggcatctcatgcgcggtgaacgaagcggccatggcccgcctcggagccgagctcaaatcgcatccgagcaccccccccaaatcccggcgccggtcgtcacgcacaccaatgccctccctgacggccatcgccgaagagtcggagcccgcgggggcggctgggcttccgacgccccccgtggaccccacgacatccaccccaacgcctcccctgttggtataggtccacggccactggccgggggcaccacataaccgaccgcagtcactgagttgggaataaaccggtattatttacctatatacgtgtatgtccatttcttcccccccccccccggaaaccaaagaaggaaacaaagaatggatgggaggagttcaggaagccggggagagggcccgcggcgcatttaaggcgttgttgtgttgactttggctcttctggcgggttggtgcggtgctgtttgttgggctcccattttacccgaagatcggctgctatccccgggacatggatcgcggggcggtggtggggtttcttctcggtgtttgtgttgtatcgtgcttggcgggaacgcccaaaacgtcctggagacgggtgagtgtcggcgaggacgtttcgttgcttccagctccggggcctacggggcgcggcccgacccagaaactactatgggccgtggaacccctggatgggtgcggccccttacacccgtcgtgggtctcgctgatgccccccaagcaggtgcccgagacggtcgtggatgcggcgtgcatgcgcgctccggtcccgctggcgatggcgtacgcccccccggccccatctgcgaccgggggtctacggacggacttcgtgtggcaggagcgcgcggccgtggttaaccggagtctggttatttacggggtccgagagacggacagcggcctgtataccctgtctgtgggcgacataaaggacccggctcgccaagtggcctcggtggtcctggtggtgcaaccggccccagttccgaccccacccccgaccccagccgattacgacgaggatgacaatgacgagggcgagggcgaggacgaaagtctagccggcactcccgccagcgggaccccccggctcccgcctccccccgcccccccgaggtcttggcccagcgcccccgaagtctcacacgtgcgtggggtgaccgtgcgtatggagactccggaagctatcctgttttcccccggggaggcgtttagcacgaacgtctccatccatgccatcgcccacgacgaccagacctacaccatggacgtcgtctggttgaggttcgacgtgccgacctcgtgtgccgagatgcgaatatacgaatcgtgtctgtatcacccgcagctcccagagtgtctgtccccggccgacgctccgtgcgccgcgagtacgtggacgtctcgcctggccgtccgcagctacgcggggtgttccagaacaaaccccccgccgcgctgttcggccgaggctcacatggagcccttcccggggctggcgtggcaggcggcctccgtcaatctggagttccgggacgcgtccccacaacactccggcctgtatctgtgcgtggtgtacgtcaacgaccatattcacgcatggggccacattaccatcagcaccgcggcgcagtaccggaacgcggtggtggaacagcccctcccacagcgcggcgcggatttggccgagcccacccacccgcacgtcggggcccctccccacgcgcccccaacccacggcgccctgcggttaggggcggtgatgggggccgccctgctgctgtctgcgctggggttgtcggtgtgggcgtgtatgacctgttggcgcaggcgtgcctggcgggcggttaaaagcagggcctcgggtaaggggcccacgtacattcgcgtggccgacagcgagctgtacgcggactggagctcggacagcgagggagaacgcgaccaggtcccgtggctggcccccccggagagacccgactctccctccaccaatggatccggctttgagatcttatcaccaacggctccgtctgtatacccccgtagcgatgggcatcaatctcgccgccagctcacaacctttggatccggaaggcccgatcgccgttactcccaggcctccgattcgtccgtcttctggtaaggcgccccatcccgaggccccacgtcggtcgccgaactgggcgaccgccggcgaggtggacgtcggagacgagctaatcgcgatttccgacgaacgcggacccccccgacatgaccgcccgcccctcgccacgtcgaccgcgccctcgccacacccgcgacccccgggctacacggccgttgtctccccgatggccctccaggctgtcgacgccccctccctgtttgtcgcctggctggccgctcggtggctccggggggcttccggcctgggggccgtcctgtgtgggattgcgtggtatgtgacgtcaattgcccgaggcgcataaagggccggtggtccgcctagccgcagcaaattaaaaatcgtgagtcactgcgaccgcaacttcccacccggagctttcttccggcctcgatgacgtcccggctctccgatcccaactcctcagcgcgatccgacatgtccgtgccgctttatcccacggcctcgccagtttcggtcgaagcctactactcggaaagcgaagacgaggcggccaacgacttcctcgtacgcatgggccgccaacagtcggtattaaggcgtcgacgcagacgcacccgctgcgtcggcatggtgatcgcctgtctcctcgtggccgttctgtcgggcggatttggggcgctcctgatgtggctgctccgctaaaagaccgcatcgacacgcgcgtccttcttgtcgtctctcttcccccccatcaccccgcaatttgcacccagcctttaactacattaaattgggttcgattggcaatgttgtctcccggttgatttttgggtgggtggggagtgggtgggtggggagtgggtgggtggggagtgggtgggtggggagtgggtgggtggggagtgggtgggtggggagtgggtgggtggggagtgggtgggtggggagtgggtgggtggggagtgggtgggtggggagtggcaaggaagaaacaagcccgaccaccagacagaaaatgtaaccatacccaaaccgactctgggggctgtttgtggggtcggaaccataggatgaacaaaccaccccgtacctcccgcacccttgggtgcgggtggctcatcggcatctgtccggtatgggttgttccccacccacttgcgttcggacgtcttagaatcatggcggttttctatgccgacatcggttttctcccccgcaataagacacgatgcgataaaatctgtttgtgaaatttattaagggtacaaattgccctagcacaggggtggggttagggccgggtccccacacccaaacgcaccaaacagatgcaggcagtgggtcgagtacagccccgcgtacgaacacgtcgatgcgtgtgtcagacagcaccagaaagcacaggccatcaacaggtcgtgcatatgtcggtgggtttggacgcggggggccatggtggtgataaagttaatggccgccgtccgccagggccacaggggcgacgtctcttggttggcccggagccactgggtgtggaccagccgcgcgtggcggcccaacatggcccctgtagccgggggcgggggatcgcgcacgtttgcagcgcacatgcgagacacctcgaccacggttcggaagaaggcccggtggtccgcgggcaacatcaccaggtgcgcaagcgcccgggcgtccagagggtagagccctgagtcatccgaggttggctcatcgcccgggtcatgccgcaagtgcgtgtgggttgggcttccggtgggcgggacgcgaaccgcggtgtggagccctacgcgggcccgagcgtacgctccatcttgtggggagaaggggtctgggctcgccaggggggcatacttgcccgggctatacagacccgcgagccgtacgtggttcgcggggggtgcgtggggtccggggctcccggggaggccggggctcccggggttgtcgtggatccctggggtcacgcggtaccctggggtctctgggagctcgcggtactctgggttccctaggttctcggggtggtcgcggaacccggggctcccggggaacacgcggtgtcctggggattgttggcggtcggacggcttcagatggcttcgagatcgtagtgtccgcaccgactcgtagtagacccgaatctccacattgccccgccgcttgatcattatcaccccgttgcgggggtccggagatcatgcgcgggtgtcctcgaggtgcgtgaacacctctggggtgcatgccggcggacggcacgccttttaagtaaacatctgggtcgcccggcccaactggggccgggggttgggtctggctcatctcgagagccacggggggaaccaccctccgcccagaaacttgggcgatggtcgtacccgggactcaacgggttaccggattacggggactgtcggtcacggtcccgccggttcttcgatgtgccacacccaaggatgcgttgggggcgattttgggcagcagcccgggagagcgcagcagaggacgctccgggtcgtgcacggcggttttggccgcctcccggtcctcacgcccccttttattgatctcatcgcgtacgtcggcgtacgtcctgggcccaacccgcatgttgtccaggaaggtgtccgccatttccagggcccacgacatgctcccccgcccgacgagcaggaagcggtccacgcaacggtcgccgccggtcgccccgacgagcaggaagcggtccacgcaacggtcgccgccggtcgcctcgacgaggacgttcctcctgcgggaaggcacgaacgcgggtgagccccctcctccgcccccgcgtcccccctcctccgcccccgcgtcccccctcctccgcccccgcgtcccccctcctccgcccccgcgtcccccctcctccgcccccgcgtcccccctcctccgcccccgcgtcccccctcctccacccccgcgtccccccctcctccgcccacccaaggtgcttacccgtgcacaaaggcggaccggtgggtttctgtcgtcggaggcccccggggtgcgtcccctgtgtttcgtgggtggggtgggtgggtctttccgcgtgtccctttccgatgcgatcccgatcccgagccggggcgtcgcgatgccgacgccgtccgctccgacggccctctgcgagtcccgctcccggtccgcgtgctccgcagccgctcccgtcgttcgtggccggcgccgtctgcgggcgtcggtcgcgccgggcctttatgtgcgccggagagacccgccccccgccgcccgggcccgcccccggggccggcgcggagtcgggcacggcgccagtgctcgcacttcgccctaataatatatatatattgggacgaagtgcgaacgcttcgcgttctcacttcttttacccggcggccccgcccccttggggcggtcccgcccgccggccaatgggggggcggcaaggcgggcggcccttgggccgcccgccgtcccgttggtcccaacgtccggcgggcgggaccgggggcccggggacggccaacgggcgcgcggggctcgtatctcattaccgccgaaccgggaagtcggggcccgggccccgcccccggcccgttcctcgttagcatgcggaacggaagcggaaaccaccggatcgggcggtaatgagatgccatgcggggcggggcgcgggcccacccgccctcgcgccccgcccatggcagatggcgcggatgggcggggccgggggttcgaccaacgggccgcggccacgggcccccggcgtgccggcgtcggggcggggtcgtgcataatggaattccgttcggggcgggcccgcctggggggcggggggccggcggcctccgctgctcctccttcccgccggcccctgggactatatgagcccgaggacgccccgatcgtccacacggagcgcggctgccgacacggatccacgacccgacgcgggaccgccagagacagaccgtcagacgctcgccgcgccgggacgccgatacgcggacgaagcgcgggagggggatcggccgtccctgtcctttttcccacccaagcatcgaccggtccgcgctagttccgcgtcgacggcgggggtcgtcggggtccgtgggtctcgccccctccccatcgagagtccgtaggtgacctaccgtgctacgtccgccgtcgcagccgtatccccggaggatcgccccgcatcggcgatggcgtcggagaacaagcagcgccccggctccccgggccccaccgacgggccgccgcccaccccgagcccagaccgcgacgagcggggggccctcgggtggggcgcggagacggaggagggcggggacgaccccgaccacgaccccgaccacccccacgacctcgacgacgcccggcgggacgggagggcccccgcggcgggcaccgacgccggcgaggacgccggggacgccgtctcgccgcgacagctggccctgctggcctccatggtagaggaggccgtccggacgatcccgacgcccgaccccgcggcctcgccgccccggacccccgcctttcgagccgacgacgatgacggggacgagtacgacgacgcagccgacgccgccggcgaccgggccccggcccggggccgcgcacgggaggccccgctacgcggcgcgtatccggaccccacggaccgcctgtcgccgcgcccgccggcccagccgccgcggagacgtcgtcacggccggcggcggccatcggcgtcatcgacctcgtcggactccgggtcctcgtcctcgtcgtccgcatcctcttcgtcctcgtcgtccgacgaggacgaggacgacgacggcaacgacgcggccgaccgcgcacgcgaggcgcgggccgtcgggcggggtccgtcgagcgcggcgccggaagcccccgggcggacgccgcccccgcccgggccaccccccctctccgaggccgcgcccaagccccgggcggcggcgaggacccccgcggcctccgcgggccgcatcgagcgccgccgggcccgcgcggcggtggccggccgcgacgccacgggccgcttcacggccgggcagccccggcgggtcgagctggacgccgacgcggcctccggcgccttctacgcgcgctatcgcgacgggtacgtcagcggggagccgtggcccggcgccgggcccccgcccccggggcgggtgctgtacggcggcctgggcgacagccgcccgggcctctggggggcgcccgaggcggaggaggcgcgacgccggttcgaggcctcgggcgccccggcggccgtgtgggcgcccgagctgggcgacgccgcgcagcagtacgccctgatcacgcggctgctgtacaccccggacgcggaggccatggggtggctccagaacccgcgcgtggtccccggggacgtggcgctggaccaggcctgcttccggatctcgggcgccgcgcgcaacagcagctccttcatcaccggcagcgtggcgcgggccgtgccccacctgggctacgccatggcggccggccgcttcggctggggcctggcgcacgcggcggccgccgtggccatgagccgccgatacgaccgcgcgcagaagggcttcctgctgaccagcctgcgccgcgcctacgcgcccctgttggcgcgcgagaacgcggcgctgacgggggccgcggggagccccggcgccggcgcagatgacgagggggtcgccgccgccgtcgtcgccgccgccgccgcaccgggcgagcgcgcggtgcccgccgggtacggcgccgcggggatcctcgccgccctggggcggctgtccgccgcgcccgcctcccccgcggggggcgacgaccccgacgccgcccgccacgccgacgccgacgacgacgccgggcgccgcgcccaggccggccgcgtggccgtggagtgcctggccgcctgccgcgggatcctggaggcgctggccgagggcttcgacggcgacctggcggccgtcccggggctggccggggcccggcccgccagccccccgcggccggagggacccgcgggccccgcttccccgccgccgccgcacgccgacgcgccccgcctgcgcgcgtggctgcgcgagctgcggttcgtgcgcgacgcgctggtgctcatgcgcctgcgcggggacctgcgcgtggccggcggcagcgaggccgccgtggccgccgtgcgcgccgtgagcctggtcgccggggccctgggccccgcgctgccgcgggacccgcgcctgccgagctccgcggccgccgccgccgcggacctgctgtttgagaaccagagcctgcgccccctgctggcggcggccgccagcgcaccggacgccgccgacgcgctggcggccgccgccgcctccgccgcgccgcgggaggggcgcaagcgcaagagtcccggcccggcccggccgcccggaggcggcggcccgcgacccccgaagacgaagaagagcggcgcggacgcccccggctcggacgcccgcgcccccctccccgcgcccccctccacgcccccggggcccgagcccgcccccgcccagcccgcggcgccccgggccgccgcggcgcaggcccgcccgcgccccgtggcgctgtcgcgccggcccgccgagggccccgaccccctgggcggctggcggcggcagcccccggggcccagccacacggcggcgcccgcggccgccgccctggaggcctactgctccccgcgcgccgtggccgagctcacggaccacccgctgttccccgtcccctggcgaccggccctcatgtttgacccgcgggccctggcctcgatcgccgcgcggtgcgccgggcccgccgccgccgcccaggccgcgtgcggcggcggcgacgacgacgataacccccacccccacggggccgccgggggccgcctctttggccccctgcgcgcctcgggcccgctgcgccgcatggcggcctggatgcgccagatccccgaccccgaggacgtgcgcgtggtggtgctgtactcgccgctgccgggcgaggacctggccggcggcggggcctcgggggggccgccggagtggtccgccgagcgcggcgggctgtcctgcctgctggcggccctggccaaccggctgtgcgggccggacacggccgcctgggcgggcaactggaccggcgcccccgacgtgtcggcgctgggcgcgcagggcgtgctgctgctgtccacgcgggacctggccttcgccggggccgtggagtttctggggctgctcgccagcgccggcgaccggcggctcatcgtggtcaacaccgtgcgcgcctgcgactggcccgccgacgggcccgcggtgtcgcggcagcacgcctacctggcgtgcgacctgctgcccgccgtgcagtgcgccgtgcgctggccggcggcgcgggacctgcgccgcacggtgctggccccgggccgcgtgttcggcccgggggtcttcgcgcgcgtggaggccgcgcacgcgcgcctgtaccccgacgcgccgccgctgcgcctgtgccgcggcggcaacgtgcgctaccgcgtgcgcacgcgcttcggcccggacacgccggtgcccatgtccccgcgcgagtaccgccgggccgtgctgccggcgctggacggccgggcggcggcctcggggaccaccgacgccatggcgcccggcgcgccggacttctgcgaggaggaggcccactcgcaccgcgcctgcgcgcgctggggcctgggcgcgccgctgcggcccgtgtacgtggcgctggggcgcgaggcggtgcgcgccggcccggcccggtggcgcgggccgcggagggacttttgcgcccgcgccctgctggagcccgacgacgacgcccccccgctggtgctgcgcggcggcgacgacgacgacgacggcccgggggccctgccgccggcgttgcccgggattcgctgggcctcggccacgggccgcagcggcaccgtgctggcggcggcgggggccgtggaggtgctgggggcggaggcgggcttggccacgcccccgcgacgggaagttgtggactgggaaggcgcctgggacgacgacgacggcggcgcgttcgagggggacggggtgctgtaacgggccgggacggggcggggcgcttgcgaaacccgaagacgcaataaacgacaacgacctgatttagttttgcagtagcgttgtttatttcgaggggcgggagggggcgaggggcgggagggggcgaggggcgggagggggcgaggggcgggagggggcgaggggcgggagggggcgaggggcgggagggggcgaggggcgggagggggcgaggggcgggagggggcgaggggcgggagggggcgaggggcgggagggggcgaggggcgggagggggcgaggggcgggagggggcgaggggcgggagggggcgaggggcgggagggggcgaggggcgggagggggcgaggggcgggagggggcgaggggcgggagggggcgaggggcgggagggggcgaggggcgggagggggcgaggggcggtggtggtgcgcgggcgcccccggagggtttggatctctgacctgagattggcggcactgaggtagagatgcccgaacccccccgagggagcgcgggacgcggccggggagggctggggccggggagggctggggccggggagggctggggccggggagggctggggccggggagggctggggccggggagggctggggccggggagggctggggctggggagggctggggctggggagggctggggcggtggtgtgtgacaggagcggcgtgttgcgctgggggacgtctggaggagcggggggtgcgcggtgacgtgtggatgaggaacaggagttgttgcgcggtgagttgtcgctgtgagttgtgttggtgggcaggtgtggtggatgacgtgacgtgtgacgtgtggatgaggaaccggagtcgccggtgcgccgtgctgttggtgttctgttggtgttgttacacctgtggcagcccgggccccccgcgggcggggcggcgcgcaaaaaaggcgggcggcggtccgggcggcgtgcgcgcgcgcggcgggcgttgggggagcggggggaggagcggggggaggagcggggggaggagcggggggaggagcggggggaggagcggggggaggagcggggggaggagcggggggaggagcggggggaggagcggggggaggagcggggggaggagcggggggaggagcggggggaggagcggggggaggagcggggggaggagcggggggaggagcggggggaggagcggggggaggagcggaaaacgggccccccccgaaacacaccccccgggggtcgcgcgcggccctttaaagcg

SEQ ID NO: 7 - DNA, 153329 bp, Artificial sequence
  synthetic sequence
agcccgggccccccgcgggcggggcggcgcgcaaaaaaggcgggcggcggtccgggcggcgtgcgcgcgcgcggcgggcgttggggagcggggggaggagcggggggaggagcggggggaggagcggggggaggagcggggggaggagcggggggaggagcggggggaggagcggggggaggagcggggggaggagcggggggaggagcggggggaggagcggggggaggagcggggggaggagcggggggaggagcggggggaggagcggggggaggagcggggggaggagcggggggaggagcggaaaacgggccccccccgaaacacaccccccgggggtcgcgcgcggccctttaaagcgcggcggcgcagcccgggccccccgcggccgagacgagcgagttagacaggcaagcactactcgcctctgcacgcacatgcttgcctgtcaaactctaccaccccggcacgctctctgtctccatggcccgccgccgccgccatcgcggcccccgccgcccccggccgcccgggcccacgggcgccgtcccaaccgcacagtcccaggtaacctccacgcccaactcggaacccgcggtcaggagcgcgcccgcggccgccccgccgccgccccccgccagtgggcccccgccttcttgttcgctgctgctgcgccagtggctccacgttcccgagtccgcgtccgacgacgacgatgacgacgactggccggacagccccccgcccgagccggcgccagaggcccggcccaccgccgccgccccccgcccccggtccccaccgcccggcgcgggcccggggggcggggctaacccctcccaccccccctcacgccccttccgccttccgccgcgcctcgccctccgcctgcgcgtcaccgcagagcacctggcgcgcctgcgcctgcgacgcgcgggcggggagggggcgccggagccccccgcgacccccgcgacccccgcgacccccgcgacccccgcgacccccgcgcgggtgcgcttctcgccccacgtccgggtgcgccacctggtggtctgggcctcggccgcccgcctggcgcgccgcggctcgtgggcccgcgagcgggccgaccgggctcggttccggcgccgggtggcggaggccgaggcggtcatcgggccgtgcctggggcccgaggcccgtgcccgggccctggcccgcggagccggcccggcgaactcggtctaacgttacacccgaggcggcctgggtcttccgcggagctcccgggagctccgcaccaagccgctctccggagagacgatggcaggagccgcgcatatatacgctgggagccggcccgcccccgaggcgggcccgccctcggagggcgggactggccaatcggcggccgccagcgcggcggggcccggccaaccagcgtccgccgagtcttcggggcccggcccactgggcgggagttaccgcccagtgggccgggccgcccacttcccggtatggtaattaaaaacttacaagaggccttgttccgcttcccggtatggtaattagaaactcattaatgggcggccccggccgcccttcccgcttccggcaattcccgcggcccttaatgggcaaccccggtattccccgcctcccgcgccgcgcgtaaccactcccctggggttccgggttatgctaattgcttttttggcggaacacacggcccctcgcgcattggcccgcgggtcgctcaatgaacccgcattggtcccctggggttccgggtatggtaatgagtttcttcgggaaggcgggaagccccggggcaccgacgcaggccaagcccctgttgcgtcggtgggaggggcatgctaatggggttctttgggggacaccgggttggtcccccaaatcgggggccgggccgtgcatgctaatgatattctttgggggcgccgggttggtccccggggacggggccgccccgcggtgggcctgcctcccctgggacgcgcggccattgggggaatcgtcactgccgcccctttggggaggggaaaggcgtggggtataagttagccctggcccgacagtctggtcgcatttgcacctcggcactcggagcgagacgcagcagccaggcagactcgggccgccccctctccgcatcaccacagaagccccgcctacgttgcgacccccagggaccctccgtccgcgaccctccaaccgcatacgacccccatggagccccgccccggagcgagtacccgccggcctgagggccgcccccagcgcgaggtgaggggccgggcgccatgtctggggcgccatattggggggcgccatattggggggcgccatgttgggggacccccgacccttacactggaaccggccgccatgttgggggacccccactcatacacgggagccgggcgccatgttagggggcgtggaaccccgtgacactatatatacagggaccgggggcgccatgttagggggcgcggaaccccctgaccctatatatacagggaccggggtcgccctgttgggggtcgccatgtgaccccctgactttatatatacagaccccccaacacatacacatggcccctttgactcagacgcagggcccggggtcgccgtgggaccccctgactcatacacagagacacgcccccacaacaaacacacagggaccggggtcgccgtgttagggggcgtggtccccactgactcatacgcagggcccccttactcacacgcatctaggggggtggggaggagccgcccgccatatttgggggacgccgtgggacccccgactccggtgcgtctggagggcgggagaagagggaagaagaggggtcgggatccaaaggacggacccagaccacctttggttgcagacccctttctcccccctcttccgaggccagcaggggggcaggactttgtgaggcggggggggggagagggggaactcgtgggcgctgattgacgcgggaaatccccccattcttacccgcccccctttttttccccttagcccgccccggatgtctgggtgtttccctgcgaccgagacctgccggacagcagcgactctgaggcggagaccgaagtgggggggcggggggacgccgaccaccatgacgacgactccgcctccgaggcggacagcacggacacggaactgttcgagacggggctgctggggccgcagggcgtggatgggggggcggtctcgggggggagccccccccgcgaggaagaccccggcagttgcgggggcgccccccctcgagaggacggggggagcgacgagggcgacgtgtgcgccgtgtgcacggatgagatcgcgccccacctgcgctgcgacaccttcccgtgcatgcaccgcttctgcatcccgtgcatgaaaacctggatgcaattgcgcaacacctgcccgctgtgcaacgccaagctggtgtacctgatagtgggcgtgacgcccagcgggtcgttcagcaccatcccgatcgtgaacgacccccagacccgcatggaggccgaggaggccgtcagggcgggcacggccgtggactttatctggacgggcaatcagcggttcgccccgcggtacctgaccctgggggggcacacggtgagggccctgtcgcccacccaccctgagcccaccacggacgaggatgacgacgacctggacgacggtgaggcgggggggcggcgaggaccctgggggaggaggaggaggaggggggagggaggaataggcgggcgggggggcgaggaaagggcgggcgcggaaagggagggcctgggagggggcgtaacctgatcgcgccccccgttgtctcttgcagcagactacgtaccgcccgccccccgccggacgccccgcgcccccccacgcagaggcgccgccgcgccccccgtgacgggcggggcgtctcacgcagccccccagccggccgcggctcggacagcgcccccctcggcgcccatcgggccacacggcagcagtaacaccaacaccaccaccaacagcagcggcggcggcggcggctcccgccagtcgcgagccgcggcgccgcggggggcgtctggcccctccgggggggttggggttggggttggggttgttgaagcggaggcggggcggccgaggggccggacgggcccccttgtcaacagacccgccccccttgcaaacaacagagaccccatagtgatcagcgactcccccccggcctctccccacaggccccccgcggcgcccatgccaggctccgccccccgccccgggcccaccgcgtcctcggccgcgtcgggacccgcgcgcccccgcgcggccgtggccccgtgcgtgcgagcgccgcctccggggcccggcccccgcgccccggcccccgcggacgcgcgccgtgtgccccagtcgcactcgtccctggctcaggccgcgaaccaagaacagagtctgtgccgggcgcgtgcgacggtggcgcgcggctcgggggggccgggcgtggagggtggacacgggccctcccgcggcgccgccccctccggcgcccccccgctcccctccgccgcctctgtcgagcaggaggcggcggtgcgtccgaggaagaggcgcgggtcgggccaggaaaacccctccccccagtccacgcgtccccccctcgcgccggcaggggccaagagggcggcgacgcaccccccctccgactcagggccgggggggcgcggccagggtgggcccgggacccccctgacgtcctcggcggcctccgcctcttcctcctctgcctcttcctcctcggccccgactcccgcgggggccgcctcttccgccgccggggccgcgtcctcctccgcttccgcctcctcgggcggggccgtcggtgccctgggagggagacaagaggaaacctccctcggcccccgcgctgcttctgggccgcgggggccgaggaagtgtgcccggaagacgcgccacgcggagacttccggggccgcccccgcgggcggcctcacgcgctacctgcccatctcgggggtctctagcgtggtcgccctgtcgccttacgtgaacaagacgatcacgggggactgcctgcccatcctggacatggagacggggaacatcggggcgtacgtggtcctggtggaccagacgggaaacatggcgacccggctgcgggccgcggtccccggctggagccgccgcaccctgctccccgagaccgcgggtaaccacgtgatgccccccgagtacccgacggcccccgcgtcggagtggaacagcctctggatgacccccgtggggaacatgctgttcgaccagggcaccctagtgggcgccctggacttccgcagcctgcggtctcggcacccgtggtccggggagcagggggcgtcgacccgggacgagggaaaacaataagggacgccccccgtgtttgtggggaggggggggtcgggcgctgggtggtctctggccgcgcccactacaccagccaatccgtgtcggggaggggaaaagtgaaagacacgggcaccacacaccagcgggtctttagtgttggccctaataaaaaactcaggggatttttgctgtctattgggaaataaaggtttacttttgtatcttttccctgtctgtgttggatggatctcgggggtgcgtgggagtgggggtgcgtgggagtgggggtgcgtgggagtgggggtgcgtgggagtgggggtgcgtgggagtgggggtgcgtgggagtgggggtgcgtgggagtgggggtgcgtgggagtgggggtgcgtgggagtgggggtgccatgttgggcaggctctggtgttaaccacagagccgcggcccgggctgcctgaccaccgatccccgaaagcatcctgccactggcatggagccagaaccacagtgggttgggtgtgggtgttaagtttccgcgagcgcctgcccgcccggactgacctggcctctggccgccacaaagggcgggggggggttaactacactatagggcaacaaaggacgggaggggtggcggggcgggacggggcgcccaaaagggggtcggccacaccacagacgtgggtgttggggggtggggcggaggggtggggggggagacagaaacaggaacatagttagaaaacaagaatgcggtgcagccagagaatcacaggagacgaggggatgggcgtgttggttaccaacccacacccaggcatgctcggtggtatgaaggagggggggcggtgcttcttagagaccgccgggggacgtggggttggtgtgcagaggcacgcgcacccgcgtcggccaggtgggccggtaccccatcccccctcccccgacccttcccacccccgcgtgccagagatcaccccggtcccccggcacccgccactcctccatatcctcgctttaggaacaactttagggggggtacacacgcgccgtgcatttccttccacaccccccctcccccgcactcccccccccccggcagtaagacccaagcatagagagccaggcacaaaaacacaggcggggtgggacacatgccttcttggagtacgtgggtcattggcgtggggggttacagcgacaccggccgaccccctggcggtcttccagccggcccttagataagggggcagttggtggtcggacgggtaagtaacagagtctgactaagggtgggagggggggaaaagaacgggctggtgtgctgtaacacgagcccacccgcgagtggcgtggccgaccttagcctctggggcgccccctgtcgtttgggtcccccccctctattggggagaagcaggtgtctaacctacctggaaacgcggcgtctttgttgaaccacaccggggcgcccttgacgagtgggataacgggggaggaagggagggaggagggtactgggggtgaagaaggggggggggggagaagcgagaacaggaaaggcgacggagcccgacaaaacaccgagaaaaaaaaaccacagcgcatgcgccgggccgttgtggggccccgggccggggccccttgggtccgccggggccccgggccgggccgccacgggggccggccgttggcggtaaccccgattgtttatctcaggccccgggccgggaacccggaaaagcctccggggggcctttttcgcgtcgcgtgccggcgagcgggcccggacggggcccggaccgccgcggtcgggggccccctcgtcccgggccgtacgcggccttcgccccgtgaggggacagacgaacgaaacattccggcgacggaacgaaaaacaccccagacgggttaaagaaacagaaaccgcaaccccccccacccccgaaacggggaaaacaaaaaacagaccagcggccggccggcgcttagggggaggatgtcgccgacgccccttggccgccccggctgcaggggggcccggagagccgcggcacccggacgcgcccggaaagtctttcgcaccacccgcgatcggcacggccgcgcccccgcttttataaaggctcagatgacgcagcaaaaacaggccacagcaccacgtgggtaggtgatgtaattttattttcctcgtctgcggcctaatggatttccgggcgcggtgcccctgtctgcagagcacttaacggattgatatctcgcgggcacgcgcgcccttaatggaccggcgcggggcggggggccggatacccacacgggcgggggggggggtgtcgcgggccgtctgctggcccgcggccacataaacaatgactctgggcctttctgcctctgccgcttgtgtgtgcgcgcgccggctctgcggtgtcggcggcggctgcggcggctgcggcggccgccgtgttcggtctcggtagccggccggcgggtggactcgcggggggccggagggtggaaggcaggggggtgtaggatgggtatcaggacttccacttcccgtccttccatcccccgttcccctcggttgttcctcgcccccccccacaccccgccgctttccgttggggttgttattgttgtcgggatcgtgcgggccgggggtcgccggggcaggggcgggggcgggggtgctcgtcgatcgaccgggctcagtgggggcgtggggtgggggggaaaaggcgaagagactgggggtgggggggggtgtcgggggtggctgtttttttttgtgggtgttttttgtggctgttcccgtcccccgtcacccccctccctccgtccccccgtcgcgggtgtttgtgtttgtttattccgacatcggtttatttaaataaacacagccgttctgcgtgtctgttcttgcgtgtggctgggggcttatatgtggggtcccgggggcgggatggggtttagcggcggggggcggcgcgccggacggggcgctggagataacggcccccggggaacgggggaccggggctgggtctcccgaggtgggtgggtgggcggcggtggccgggccgggccgggccgggtgggcggggtttggaaaaacgaggaggaggaggaggagaaggagggggggggagacggggggaaagcaaggacacggcccggggggtgggagcgcgggccgggccgctcgtaagagccgcgacccggccgccggggagcgttgtcgccgtcggtctgccggcccccgtccctcccttttttgaccaaccagcgcccccccccctcaccaccattcctaccaccaccaccaccaccgacacctcccgcacacccccgcccacactccccccccccacccaacccgcaccacgagcacgggttgggggtagcaggggatcaaaggggggcaaggccggcggggcggttcgggggcgggggcgggagaccgagtaggccccgcccatccgcggcccctcccggcagccacgccccccagcgtcgggtgtcacggggaaagagcagggggagaggggagagggggggagaggggagagggggggagaggggagagggggggagaggggagagggggggagaggggagagggggggagaggggagagggggggagaggggagagggggggagaggggagagggggggagaggggagagggggggagaggggagagggggggagagggggtatataaaccaacgaaaagcgcgggaacggggatacggggcttgtgtggcacgacgtcgtggttgtgttactgggcaaacacttggggactgtaggtttctgtgggtgccgaccctaggcgctatggggattttgggttgggtcgggcttattgccgttggggttttgtgtgtgcgggggggcttgtcttcaaccgaatatgttattcggagtcgggtggctcgagaggtgggggatatattaaaggtgccttgtgtgccgctcccgtctgacgatcttgattggcgttacgagaccccctcggctataaactatgctttgatagacggtatatttttgcgttatcactgtcccggattggacacggtcttgtgggataggcatgcccagaaggcatattgggttaacccctttttatttgtggcgggttttttggaggacttgagtcaccccgcgtttcctgccaacacccaggaaacagaaacgcgcttggccctttataaagagatacgccaggcgctggacagtcgcaagcaggccgccagccacacacctgtgaaggctgggtgtgtgaactttgactattcgcgcacccgccgctgtgtagggcgacaggatttgggacctaccaacggaacgtctggacggaccccggttctgccgccggacgatgaagcgggcctgcagccgaagcccctcaccacgccgccgcccatcatcgccacgttggaccccaccccgcgacgggacgccgccgcaaaaagcagacgccgacgaccccactcccggcgcatctaatgatgccgcgacggaaacccgtccgggttcggggggcgaaccggccgcctgtcgctcgtcagggccggcgggcgctcctcgccgccctagaggctgtcccgctggtgtgacgttttcctcgtccgcgccccccgaccctcccatggatttaacaaacgggggggtgtcgcctgtggcgacctcggcgcctctggactggaccacgtttcggcgtgtgtttctgatcgacgacgcgtggcggcccctgttggagcctgagctggcgaaccccttaaccgcccacctcctgaccgaatataatcgtcggtgccagaccgaagaggtgctgccgccgcgggaggatgtgttttcgtggactcgttattgcacccccgacgaggtgcgcgtggttatcatcggccaggacccatatcaccaccccggccaggcgcacggacttgcgtttagcgtgcgcgcgaacgtgccgcctcccccgagtcttcggaatgtcttggcggccgtcaagaactgttatcccgaggcacggatgagcggccacggttgcctggaaaagtgggcgcgggacggcgtcctgttactaaacacgaccctgaccgtcaagcgcggggcggcggcgtcccactctagaatcggttgggaccgcttcgtgggcggagttatccgccggttggccgcgcgccgccccggcctggtgtttatgctctggggcgcacatgcccagaatgccatcaggccggaccctcgggtccattgcgtcctcaagttttcgcacccgtcgcccctctccaaggttccgttcggaacatgccagcatttcctcgtggcgaatcgatatctcgagacccggtcgatttcacccatcgactggtcggtttgaaaggcatcgacgtccggggttttcgtctgtgggggcttttgggtatttccgatgaataaagacggttaatggttaaacctctggtctcatacgggtcggtgatgtcgggcgtcgggggagagggagttccctctgcgcttgcgattctagcctcgtggggctggacgttcgacacgccaaaccacgagtcagggatatcgccagatacgactcccgcagattccattcggggggccgctgtggcctcacctgaccaacctttacacgggggcccggaacgggaggccacagcgccgtctttctccccaacgcgcgcggatgacggcccgccctgtaccgacgggccctacgtgacgtttgataccctgtttatggtgtcgtcgatcgacgaattagggcgtcgccagctcacggacaccatccgcaaggacctgcggttgtcgctggccaagtttagcattgcgtgcaccaagacctcctcgttttcgggaaacgccccgcgccaccacagacgcggggcgttccagcgcggcacgcgggcgccgcgcagcaacaaaagccttcagatgtttgtgttgtgcaaacgcacccacgccgctcgagtgcgagagcagcttcgggtcgttattcagtcccgcaagccgcgcaagtattacacgcgatcttcggacgggcggctctgccccgccgtccccgtgttcgtccacgagttcgtctcgtccgagccaatgcgcctccaccgagataacgtcatgctggcctcgggggccgagtaaccgcccccccgcgccaccctcactgcccgtcgcgcgtgtttgatgttaataaataacgcataaatttggctggttgtttgttgtctttaatggaccgcccgcagggggggtggcatttcagtgtcgggtgacgagcgcgatccggccgggatcctaggaccccaaaagtttgtctgcgtattccagggcggggctcagttgaatctcccgcagcacctctaccagcaggtccgcggtgggctggagaaactcggccgtcccggggcaggcggtcgtcgggggtggaggcgcggcgcccaccccgtgtgccgcgcctggcgtctcctctgggggcgacccgtaaatggttgcagtgatgtaaatggtgtccgcggtccagaccacggtcaaaatgccggccgtggcgctccgggcgctttcgccgcgcgaggagctgacccaggagtcgaacggatacgcgtacatatgggcgtcccacccgcgttcgagcttctggttgctgtcccggcctataaagcggtaggcacaaaattcggcgcgacagtcgataatcaccaacagcccaatgggggtgtgttggataacaacgcctccgcgcggcaggcggtcctggcgctcccggccccgtaccatgatcgcgcgggtgccgtactcaaaaacatgcaccacctgcgcggcgtcgggcagtgcgctggtcagcgaggccctggcgtggcataggctatacgcgatggtcgtctgtggattggacatctcgcggtgggtagtgagtcccccgggccgggttcggtggaactgtaaggggacggcgggttaatatacaatgaccacgttcggatcgcgcagagccgatagtatgtgcttactaatgacgtcatcgcgctcgtggcgctcccggagcggatttaagttcatgcgaaggaattcggaggaggtggtgcgggacatggccacgtacgcgctgttgaggcgcaggttgccgggcgtaaagcagatggcgaccttgtccaggctaaggccctgggagcgcgtgatggtcatggcaagcttggagctgatgccgtagtcggcgtttatggccatggccagctccgtagagtcaatggactcgacaaactcgctgatgttggtgttgacgacggacatgaagccgtgttggtcccgcaagaccacgtaaggcaggggggcctcttccagtaactcggccacgttggccgtcgcgtgccgcctccgcagctcgtccgcaaaggcaaacacccgtgcgtacgtgtatcccatgagcgtataattgtccgtctgcagggcgacggacatcagccccccgcgcggcgagccggtcagcatctcgcagccccggaagataacgttgtccacgtacgtgctaaagggggcgccttcaaatgcctccccaaagagctcttggaggattcggaatctcccgaggaaggcccgcttcagcagcgcaaactgggtgtgaacggcggcggtggtctccggttccccgggggtgtagtggcagtaaaacacgtcgagctgttgttcgtccagccccgcgaaaataacgtcgaggtcgtcgtcgggaaaatcgtccgggcccccgtcccgcggccccagttgcttaaaatcaaacgcacgctcgccgggggcgcctgcgtcggccattaccgacgcctgcgtcggcacccccgaagatttggggcgcagagacagaatctccgccgttagttctcccatgcgggcgtaggcgagggtcctctgggtcgcatccaggcccgggcgctgcagaaagttgtaaaaggagataagcccgctaaatatgagccgcgacaggaacctgtaggcaaactccaccgaagtctccccctgagtctttacaaagctgtcgtcacgcaacactgcctcgaaggcccggaacgtcccactaaacccaaaaaccagttttcgcaggcgcgcggttaccgcgatctggctgttgaggacgtaagtgacgtcgttgcgggccacgaccagctgctgtttgctgtgcacctcgcagcgcatgtgccccgcgtcctggtcctggctctgcgagtagttggtgatgcggctggcgttggccgtgagccacttttcaatagtcaggccgggctggtgtgtcagccgtcggtattcgtcaaactccttgaccgacacgaacgtaagcacggggagggtgaacacgacaaactccccctcacgggtcaccttcaggtaggcgtggagcttggccatgtacgcgctcacctctttgtgggaggagaacaaccgcgtccagccggggaggttggcggggttggtgatgtagttttccgggacgacgaagcgatccacgaactgcatgtgctcctcggtgatgggtaggccgtactccagcaccttcatgaggttaccgaactcgtgctcgatgcaccgtttgttgttaataaaaatggcccagctatacgagaggcgggcgtactcccgcagcgtgcggttgcagatgaggtacgtgagcacgttctcgctctggcggacggaacaccgcagtttctggtgctcgaaggtcgactccagggacgccgtctgtgtcggcgagcccacacacaccaacacgggccgcaggcgggccgcgtactggggggtgtggtacagggcgttaatcatccaccagcaatacaccacggccgtgaggaggtgacgcccaaggagcccggcctcgtcgatgacgatcacgttgctgcgggtaaaggccggcagcgccccgtgggtggccggggccaaccgcgtcagggcgccctcggccaaccccagggtccgttccagggcggccagggcgcgaaactcgttccgcgactcctcgcccccggaggcggccagggtgcgcttcgtgaggtccaaaatcacctcccagtagtacgtcagatctcgtcgctgcaggtcctccagcgaggcggggttgctggtcagggtgtacgggtactgccccagttgggcctggacgtgattcccgcgaaacccaaattcatgaaagatggtgttgatgggtcggctgagaaaggcgcccgagagtttggcgtacatgttttgggccgcaatgcgcgtggcgcccgtcaccacacagtccaagacctcgttgattgtctgcacgcacgtgctctttccggagccagcgttgccggtgataagatacaccgcgaacggaaactccctgaggggcaggcctgcgggggactctaaggccgccacgtcccggaaccactgcagacggggcacttgcgctccgtcgagctgttgttgcgagagctctcggatgcgcttaaggattggctgcaccccgtgcatagacgtaaaatttaaaaaggcctcggccctccctggaacggctggtcggtccccgggttgctgaaggtgcggcgggccgggtctctgtccgtctagctggcgctccccgccggccgccgccatgaccgcaccacgctcgcgggcccccactacgcgtgcgcggggggacacggaagcgctgtgctcccccgaggacggctgggtaaaggttcaccccacccccggtacgatgctgttccgcgagattctccacgggcagctggggtataccgagggccagggggtgtacaacgtcgtccggtccagcgaggcgaccacccggcagctgcaggcggcgatctttcacgcgctcctcaacgccaccacttaccgggacctcgaggcggactggctcggccacgtggcggcccgcggtctgcagccccaacggctggttcgccggtacaggaacgcccgggaggcggatatcgccggggtggccgagcgggtgttcgacacgtggcggaacacgcttaggacgacgctgctggactttgcccacgggttggtcgcctgctttgcgccgggcggcccgagcggcccgtcaagcttccccaaatatatcgactggctgacgtgcctggggctggtccccatattacgcaagcgacaagaagggggtgtgacgcagggtctgagggcgtttctcaagcagcacccgctgacccgccagctggccacggtcgcggaggccgcggagcgcgccggccccgggttttttgagctggcgctggccttcgactccacgcgcgtggcggactacgaccgcgtgtatatttactacaaccaccgccggggcgactggctcgtgcgagaccccatcagcgggcagcgcggagaatgtctggtgctgtggcctcccttgtggaccggggaccgtctggtcttcgattcgcccgtacagcggctgtttcccgagatcgtcgcgtgtcactccctccgggaacacgcgcacgtctgccggctgcgcaataccgcgtccgtcaaggtgctgctggggcgcaagagcgacagcgagcgcggggtggccggcgccgcgcgggtcgttaacaaggtgttgggggaggacgacgagaccaaggccgggtcggccgcctcgcgcctcgtgcggcttatcatcaacatgaagggcatgcgccacgtaggcgacattaacgacactgtgcgtgcctacctcgacgaggccggggggcacctgatagacgccccggccgtcgacggtaccctcccgggattcggcaagggcggaaacagccgcgggtctgcgggccaggaccagggggggcgggcgccgcagcttcgccaggccttccgcacggccgtggttaacaacatcaacggcgtgttggagggctatataaataacctgtttggaaccatcgagcgcctgcgcgagaccaacgcgggcctggcgacccagttgcaggagcgcgaccgcgagctccggcgcgcaacatcgggggccctggagcgccagcagcgcgcggccgacctggcggccgagtccgtgaccgggggatgcggcagccgccctgcgggggcggacctgctccgggccgactatgacattatcgacgtcagcaagtccatggacgacgacacgtacgtcgccaacagttttcagcacccgtacatcccttcgtacgcccaggacctggagcgcctgtcgcgcctctgggagcacgagctggtgcgctgtttcaaaattctgtgtcaccgcaacaaccagggccaagagacgtcgatctcgtactccagcggggcgatcgccgcattcgtcgccccctactttgagtcagtgcttcgggccccccgggtaggcgcgcccatcacgggctccgatgtcatcctgggggaggaggagttatgggatgcggtgtttaagaaaacccgcctgcaaacgtacctgacagacatcgcggccctgttcgtcgcggacgtccagcacgcagcgctgcccccgcccccctccccggtcggcgccgatttccggcccggcgcgtccccgcggggccggtccagatcgcggtcgcccggaagaactgcgcgaggcgcgccggaccagggcgggggcatcgggcaccgggatggccgccgcgacggccgacgatgaggggtcggccgccaccatcctcaagcaggccatcgccggggaccgcagcctggtcgaggcggccgaggcgattagccagcagacgctgctccgcctggcctgcgaggtgcgccaggtcggcgaccgccagccgcggtttaccgccaccagcatcgcgcgcgtcgacgtcgcgcctgggtgccggttgcggttcgttctggacgggagtcccgaggacgcctatgtgacgtcggaggattactttaagcgctgctgcggccagtccagttatcgcggcttcgcggtggcggtcctgacggccaacgaggaccacgtgcacagcctggccgtgccccccctcgttctgctgcaccggttctccctgttcaaccccagggacctcctggactttgagcttgcctgtctgctgatgtacctggagaactgcccccgaagccacgccaccccgtcgacctttgccaaggttctggcgtggctcggggtcgcgggtcgccgcacgtccccattcgaacgcgttcgctgccttttcctccgcagttgccactgggtcctaaacacactcatgttcatggtgcacgtaaaaccgttcgacgacgagttcgtcctgccccactggtacatggcccggtacctgctggccaacaacccgccccccgttctctcggccctgttctgtgccaccccgacaagctcctcattccggctgccggggccgcccccccgctccgactgcgtggcctataaccccgccgggatcatggggagctgctgggcgtcggaggaggtgcgcgcgcctctggtctattggtggctttcggagaccccaaaacgacagacgtcgtcgctgttttatcagttttgttgaattttaggaaataaacccggttttgtttctgtggcctcccgacggatgcgcgtgtccttactccgtcttggtgggtgggtggctgtgtatggcgtcccatctgtgcggggaggggggcaagtcggcacgtattcggacagactcaagcacacacgggggagcgctcttgtctcagggcaatgtttttattggtcaaactcaggcaaacagaaacgacatcttgtcgtcaaagggatacacaaacttccccccctcgccccatactcccgccagcaccccggtaaacaccaactcaatctcgcgcaggatttcgcgcaggtgatgagcgcagtccacgggggggagcacaaggggccgcgggtatagatcgacggggacgccgaccgactccccgcctccgggacagacacgcacgacgcgccgccagtagtgctctgcgtccagcaaggcgccgccgcggaaggcagtggggggcaaggggtcgctggcctcaaagggggacacccgaacgctccagtactccgcgtccaaccgtttattaaacgcgtccaagataaggcggtcgcaggcgtcctccataaggccccgggccgtgagtgcgtcctcctccggcacgcctgccgttgtcaggcccaggacccgtcgcagcgtgtcgcgtacgaccccggccgccgtggtgtacgcgggcccgcggagaggaaatcccccaagatggtcagtgttgtcgcgggagttccagaaccacactcccgcctggctccaggcgactgcgtgggtgtagacgccctcgagggccaagcacagtgggtgccgcagccggaggccgttggccctaagcacggctcccacggccgtctcgatggcccgccgggcgtcctcgatcaccccggaagccgcatccgcgtcttgggggtccacgttaaagacaccccagaacgcacccccatcgcccccgcagaccgcgaacttcaccgagctggccgtctcctcgatctgcaggcagacggcggccattaccccacccaggagctgccgcagcgcagggcaggcgttgcacgtgtccgggaccaggcgctccaagacggccccggcccagggctctgagggagcggccaccaccagcgcgtccagtcttgctaggcccgtccggccgtgggggtccgccagcccgctccccccgaggtcggccagggccgccaggagctgggcgcgaagtccggggaagcaaaaccgcgccgtccagacgggcccgacggccgcgggcgggtctaacagttggatgattttagtggcgggatgccaccgcgccaccgcctcccgcactgcgggcaggaggcatccggctgccgccgaggccacgccgggccaggctcgcggggggaggacgaccctgacccccaccgcgggccaggcccccaggagcgcggcgtaagcggccgcggccccgcgcaccaggtcccgtgccgactcggccgtggccggcacggtgaacgtgggccaacccggaaaccccaggacggcaaagtacgggacgggtcccccccggacctcaaactcgggccccagaaaggcaaagacgggggccagggccccgggggcggcgtggaccgtggtatgccactgccggaaaagggcgacgagcgccggcgcggagaacttctcgccggcgcttacaaagtagtcgtaatcgcggggcagcagcacccgtgccgtgactcgttgtgggtgcccgcgtggccgcaggcccacctcgcacacctcgaccaggtccccgaacgcgccctccttcttgatcggcggaaacgcaagagtctggtattcgcgcgcaaatagcgcggttccggtggtgatgttaacggtcagcgaagcggtggacgcgcactggggggtgtcgcgaatggccgccaggcgcgcccacgccagccgcgcgtcgggatgctcggcaacgcgcgccgccagggccatagggtcgatgtcaatgttggcctccgcgaccaggagagcggcgcgaggggcggcgggcgggccccacgacgctctctcaactttcaccaccagtcccgtgcgtgggtccgagccgatacgcagcggggcgaacagggccaccggcccggtctggcgctccagggccgccaggacgcacgcgtacagcgcccgccacagagtcgggttctccaggggctccagcggggaggcggccggcgtcgtcgcggcgcgggcggccgccacgacggcctggacggagacgtccgcggagccgtagaaatcccgcagctccgtcgcggtgacggagacctccgcaaagcgcgcgcgaccctcccctgcggcgttgcgacatacaaaatacaccagggcgtggaagtactcgcgagcgcgggggggcagccataccgcgtaaagggtaatggcgctgacgctctcctccacccacacgatatctgcggtgtccatcgcacggcccctaaggatcacgggcggtctgtgggtcccatgctgccgtgcctggccgggcccggtgggttgcggaaaccggtgacgggggggggggcggtttttggggttggggtgggaaacggcccgggtccgggggccaacttggcccctcggtgcgttccggcaacagcgccgccggtccgcggacgaccacgtaccgaacgagtgcggtcccgagacttatagggtgctaaagttcaccgccccctgcatcatgggccaggcctcggtggggagctccgacagcgccgcctccaggatgatgtcagcgttggggttggcgctggatgagtgcgtgcgcaaacagcgcccccacgcgggcacgcgtagcttgaagcgcgcgcccgcaaactcccgcttgtgggccataagcagggcgtacagctgcctgtgggtccggcaggcgctgtggtcgatgtggtgggcgtccaacaaccccacgattgtctgtttggtgaggtttttaacgcgccccgccccgggaaacgtctgcgtgcttttggccatctgcacgccaaacagttcgccccagattatcttgaacagcgccaccgcgtggtccgtctcactaacggaccgcgcgggggacagccgcttagggcgtcggcgacgcgcttgacggcttcctccgagagcagaagtccgtcggttacgttacagtggcccagttcgaacaccagctgcatgtagcggtcgtagtggggggtcagcaggtccagcacgtcatcggggccgaaggtcctcccagatcccccggccgccgagtcccaatgcaggcgcgcggccatggtgctgcacaggcacaacagctcccagacaggggttacgttcagggtggggggcagggccacgagctccagctctccggtgacgttgatcgtggggatgacgcccgtggcgtagtggtcatagatccgccgaaatatggcgctgctgcgggtggccatgggaacgcggagacaggcctccagcaacgccaggtaaataaaccgcgtgcgtcccatcaggctgttgaggttgcgcatgagcgcgacaatttccgccggcgcgacatcggaccggaggtatttttcgacgaaaagacccacctcctccgtctcggcggcctgggccggcagcgacgcctcgggatcccggcaccgcagctcccgtagatcgcgctgggccctgagggcgtcgaaatgtacgccccgcaaaaacagacagaagtcctttggggtcagggtatcgtcgtgtccccagaagcgcacgcgtatgcagtttagggtcagcagcatgtgaaggatgttaaggctgtccgagagacacgccagcgtgcatctctcaaagtagtgtttgtaacggaatttgttgtagatgcgcgacccccgccccagcgacgtgtcgcatgccgacgcgtcacagcgccccttgaaccggcgacacagcaggtttgtgacctgggagaactgcgcgggccactggccgcaggaactgaccacgtggttcaggagcatgggcgtaaagacgggctccgagcgcgccccggagccgtccatgtaaatcagtagctcccccttgcggagggtgcgcacccgtcccagggactggtacacggacaccatgtccggtccgtagttcatgggtttcacgtaggcgaacatgccatcaaagtgcaggggatcgaagctgaggcccacggttacgaccgtcgtgtatataaccacgcggtattggccccacgtggtcacgtccccgaggggggtgagcgagtgaagcaacagcacgcggtccgtaaactgacggcagaaccgggccacgatctccgcgaaggagaccgtcgacgaaaaaatgcagatgttatcgcccccgccaaggcgcgcttccagctccccaaagaacgtggccccccgggcgtccggagaggcgtccggagacgggccgctcggcggcccgggcgggcgcagggcagcctgcaggagctcggtccccagacgcgggagaaacaggcaccggcgcgccgaaaacccgggcatggcgtactcgccgaccaccacatgcacgtttttttcgccccggagaccgcacaggaagtccaccaactgcgcgttggcggttgcgtccatggcgatgatccgaggacatgtgcgcagcaggcgtagcattaacgcatccacgcggcccagttgctgcatcgttggcgaatagagctggcccagcgtcgacataacctcgtccagaacgaggacgtcgtagttgttcagaaggttggggcccacgcgatgaaggctttccacctggacgataagtcggtggaaggggcggtcgttcataatgtaattggtggatgagaagtaggtgacaaagtcgaccaggcctgactcagcgaaccgcgtcgccagggtctgggtaaaactccgacgacaggagacgacgagcacactcgtgtccggagagtggatcgcttcccgcagccagcggatcagcgcggtagtttttcccgaccccattggcgcgcggaccacagtcacgcacctggccgtcggggcgctcgcgttggggaaggtgacgggtccgtgctgctgccgctcgatcgttgttttcgggtgaacccggggcacccattcggccaaatcccccccgtataacatccgcgctagcgatacgctcgacgtgtactgttcgcactcgtcgtccccaatgggacgcccggcccccagaggatcccccgactccgcgccccccacgaaaggcatgaccggggcgcggacggcgtggtgggtctggtgtgtgcaggtggcgacgtttgtggtctctgcggtctgcgtcacggggctcctcgtcctggcctctgtgttccgggcacggtttccctgcttttacgccacggcgagctcttatgccggggttaactccacggccgaggtgcgcgggggtgtagccgtgcccctcaggttggacacgcagagccttgtgggcacttatgtaatcacggccgtattgttgttggccgcggccgtgtatgccgtggtcggcgccgtgacctcccgctacgaccgcgccctggacgcgggccgccgtctggctgcggcccgcatggccatgccgcacgccacgctgatcgccggaaacgtctgctcttggttgctgcagatcaccgtcctgctgctggcccatcgcatcagccagctggcccacctggtttacgtcctgcactttgcgtgtctggtgtattttgcggcccatttttgcaccaggggggtcctgagcgggacgtatctgcgtcaggtgcacggcctgatggagctggccccgacccatcatcgcgtcgtcggcccggctcgcgccgtgctgacaaacgccttgctgttgggcgtcttcctgtgcacggccgacgccgcggtatccctgaataccatcgccgcgttcaactttaatttttcggccccgggcatgctcatctgcctgaccgtgctgttcgccattctcgtcgtatcgctgttgttggtggtcgagggggtgttgtgtcactacgtgcgcgtgttggtgggcccccacctgggggccgttgccgccacgggcatcgtcggcctggcctgcgagcactattacaccaacggctactacgtggtggagacgcagtggccgggggcacagacgggagtgcgcgtcgccctcgccctggtcgccgcctttgccctcggcatggccgtgctccgctgcacccgcgcctatctgtatcacaggcggcaccacaccaaattttttatgcgcatgcgcgacacgcgacaccgcgcacattccgccctcaagcgcgtacgcagttccatgcgcggatcgcgagacggccgccacaggcccgcgcccggcagcccgcccgggattcccgaatatgcggaagacccctacgcgatctcatacggcggccagctcgaccggtacggagattccgacggggagccgatttacgacgaggtggcggacgaccaaaccgacgtattgtacgccaagatacaacacccgcggcacctgcccgacgacgagcccatctatgacaccgttggggggtacgaccccgagcccgccgaggaccccgtgtacagcaccgtccgccgttggtagctgtttggttccgttttaataaaccgtttgtgtttaacccgaccgtggtgtatgtctggtgtgtggcgtccgatcccgttactatcaccgtccccccccctcaaccccggcgattgtgggttttttaaaaacgacacgcgtgcgaccgtatacagaacattattttggtttttattcgctatcggacatggggggtggaaactgggtggcggggcaggcgcctccgggggtccgccggtgagtgtggcgcgagggggggtccgacgaacgcaggcgcggtctccccggggcccgcgtaaccacgcgcatatccgggggcacgtagaaattaccttcctcttcggactcgatatccacgacgtcaaagtcgtgggcggtcagcgagacgacctccccgtcgtcggtgatgaggacgttgtttcggcagcagcagggccgggccccggagaacgagaggcccatagctcggcgagcgtgtcgtcgaacgccaggcggctgcttcgctggatggccttatagatctccggatcgatgcggacgggggtaatgatcagggcgatcggaacggcctggttcgggagaatggacgccttgctgggtcctgcggccccgagagccccggcgccgtcctccaggcggaacgttacgccctcctccgcgctggtgcggtgcctgccgataaacgtcaccagatgcgggtggggggggcagtcggggaagtggctgtcgagcacgtagccctgcaccaagatctgcttaaagttcgggtggcgggggttcgcgaagacgggctcgcggcggaccagatccccggagctccaggacacgggggagatggtgtggcgtccgaggtcgggggcgccaaacagaagcacctccgagacaacgccgctatttaactccaccaaggcccgatccgcggcggagcaccgccttttttcgcccgaggcgtgggcctctgaccaggcctggtcttgcgtgacgagagcctcctccgggccggggacgcgcccgggcgcgaagtatcgcacgctgggcttcgggatcgaccggataaatgcccggaacgcctccggggaccggtgtgccatcaagtcctcgtacgcggaggccgtggggtcgctggggtccatggggtcgaaagcgtacttggcccggcatttgacctcgtaaaaggccaggggggtcttggggactggggccaggtagccgtgaatgtcccgaggacagacgagaatatccagggacgccccgaccatccccgtgtgaccgtccatgaggaccccacacgtatgcacgttctcttcggcgaggtcgctgggttcgtggaagataaagcgccgcgtgtcggcgccggcctcgccgccgtcgtccgcgcggcccacgcagtagcgaaacagcaggcttcgggccgtcggctcgttcacccgcccgaacatcaccgccgaagactgtacatccggtcgcaggctggcgttgtgcttcagccactggggcgagaaacacggaccctgggggccccagcggagggtggatgcggtcgtgaggccccgccggagcagggcccatagctggcagtcggcctggttttgcgtggccgcctcgtaaaaccccatgaggggccggggcgccacggcgtccgcggcggccgggggggcgcggcgcgtcaggcgccataggtgccggccgagtccgcggtccaccatacccgcctcctcgaggaccacggccagggaacacagataatccaggcgggcccagaggggaccgatggccagaggggcgcggacgccgcgcagcaacccgcgcaggtggcgctcgaacgtctcggctagtatatgggagggcagcgcgttggggatcaccgacgccgaccacatagagtcaaggtccggggagtcgggatcggcgtccgggtcgcgggcgtgggtgcccccaggagatagcggaatgtccggggtcggaggcccggaggcgtcagaaagtgccggcgacgcggcccggggcttttcgtctgcggtgtcggtggcgtgctgatcacgtggggggttatcgggcgaatgggagctcgggtccacagctgacgtcgtctggggtggggggggcaggggacggaaggtggttgtcagcggaagactgttagggcgggggcgcttgggggggctgtcggggccacgaggggtgtcctcggccagggcccagggacgcttagtcacggtgcgtcccggcggacatgctgggcctaccgtggactccatttccgagacgacgtggggggagcggtggttgagcgcgccgccgggtgaacgctgattctcacgacagcgcgtgccgcgcgcacgggttggtgtgatacaggcgggacaccagcaccaggagaggcttaagctcgggaggcagcgccaccgacgacagtatcgccttgtgtgtgtgctggtaatttatacaccgatccgtaaacgcgcgccgaatcttgggattgcggaggtggcgccggatgccctctgggacgtcatacgccaggccgtgggtgttggtctcggccgagttgacaaacagggctgggtgcagcacgcagcgataggcgagcagggccagggcgaagtccggcgacagctggttgttgaaatactggtaaccgggaaaccgggtcacgggtacgcccaggctcggggcgacgtacacgctaaccaccaactccagcagcgtctggcccagggcgtacaggtcaaccgctagcccgacgtcgtgcttcaggcggtggttggtaaattcggcccgttcgttgttaaggtatttcaccaacagctccgggggctggttatacccgtgacccaccagggtgtgaaagttggctgtggttagggcggtgggcatgccaaacatccggggggacttgaggtccggctcctggaggcaaaactgcccccgggcgatcgtggagttggagttgagggtgacgaggctaaagtcggcgaggacggcccgccggagcgagacggcgtccgaccgcagcatgacgaggatgttggcgcacttgatatccaggtggctgatcccgcaggtggtgtttaaaaacacaacggcacgggccagctccgtgaagcactggtggagggccgtcgagaccgaggggtttgttgtgcgcagggacgccagttggccgatatacttaccgaggtccatgtcgtacgcggggaacactatctgtcgttgttgcagcgagaacccgaggggcgcgatgaagccgcggatgttgtgggtgcggccggcgcgtagagcgcactccccgaccaacagggtcgcgatgagctcaacggcaaaccactccttttcctttatggtcttaacggcaagcttatgttcgcgaatcagttggacttcgccgtatcccccagaccccccgaagcttcgggccccggggatctcgagggtcgtgtagtgtagggcggggttgatggcgaacacggggctgcatagcttgcggatgcgcgtgagggtgaggatgtgcgagggggacgaggggggtgcggttaacgccgcctgggatctgcgcaggggcgggcggttcagtttggccgccgtaccgggcgcctcgggggacgcgcggcgatgagacgagcggctcattcgccatcgggatagtcccgcgcgaagccgctcgcggaggccggatcggtggcggcacccgtgggaggagcgggagacggcggcgttctggagagaggggccgctggggcgcccggaggccccatgggggttggagtgtatgtaggatgcgagccaatccttgaaggaccgttggcgtgcaccttgggggctgaggttagctgccacatgaccagcaggtcgctgtctgcgggactcatccatccttcggccaggtcgccgtctccccacagagaagcgttggtcgctgcctcctcgagttgctcctcctggtccgcaagacgatcgtccacggcgtccaggcgctcaccaagcgccggatcgaggtaccgtcggtgtgcggttagaaagtcacgacgcgccgcttgctcctccacgcgaattttaacacaggtcgcgcgctgtcgcatcatctctaagcgcgcgcgggactttagccgcgcctccaattccaagtgggccgcctttgcagccataaaggcgccaacaaaccgaggatcttgggtgctgacgccctcccggtgcagctgcagggtctggtccttgtaaatctcggctcggaggtgcgtctcggccaggcgtcggcgcagggccgcgtgggcggcatctcggtccattccgccaccctgcgggcgacccgggggtgctctgatagtctcgcgtgcccaaggcccgtgatcggggtacttcgccgccgcgacccgccacccggtgtgcgcgatgtttggtcagcagctggcgtccgacgtccagcagtacctggagcgcctcgagaaacagaggcaacttaaggtgggcgcggacgaggcgtcggcgggcctcacaatgggcggcgatgccctacgagtgccctttttagatttcgcgaccgcgacccccaagcgccaccagaccgtggtcccgggcgtcgggacgctccacgactgctgcgagcactcgccgctcttctcggccgtggcgcggcggctgctgtttaatagcctggtgccggcgcaactaaaggggcgtgatttcgggggcgaccacacggccaagctggaattcctggcccccgagttggtacgggcggtggcgcgactgcggtttaaggagtgcgcgccggcggacgtggtgcctcagcgtaacgcctactatagcgttctgaacacgtttcaggccctccaccgctccgaagcctttcgccagctggtgcactttgtgcgggactttgcccagctgcttaaaacctccttccgggcctccagcctcacggagaccacgggcccccccaaaaaacgggccaaggtggacgtggccacccacggccggacgtacggcacgctggagctgttccaaaaaatgatccttatgcacgccacctactttctggccgccgtgctcctcggggaccacgcggagcaggtcaacacgttcctgcgtctcgtgtttgagatccccctgtttagcgacgcggccgtgcgccacttccgccagcgcgccaccgtgtttctcgtcccccggcgccacggcaagacctggtttctggtgcccctcatcgcgctgtcgctggcctcctttcgggggatcaagatcggctacacggcgcacatccgcaaggcgaccgagccggtgtttgaggagatcgacgcctgcctgcggggctggttcggttcggcccgagtggaccacgttaaaggggaaaccatctccttctcgtttccggacgggtcgcgcagtaccatcgtgtttgcctccagccacaacacaaacgtaagtcctcttttctttcgcatggctctcccaaggggccccgggtcgacccgacccacacccacccacccacatacacacacaaccagacgcgggaggaaagtctgccccgtgggcactgatttttattcgggatcgcttgaggaggcccgggcaacggcccgggcaacggtggggcaactcgtagcaaataggcgactgatgtacgaagagaagacacacaggcgccacccggcgctggtcggggggatgttgtccgcgccgcaccgtcccccgacgacctcttgcagacggtccgtgatgcaaggacggcggggggcctgcagcagggtgaccgtatccacgggatggccaaagagaagcggacacaggctagcatccccctggaccgccagggtacactgggccatcttggcccacagacacggggcgacgcagggacaggactccgttacgacggaggagagccacagtgcgttggcggaatcgatgtggggcggcggggcgcaggactcgcagccccccgggtggttagtgatcctggccaggagccatcccagatggcgggccctgcttcccggtggacagagcgaccccaggtcgctgtccatggcccagcagtagatctggccgctggggaggtgccaccaggcccccgggcccaaggcgcagcacgcgcccggctccgggggggtcttcgcggggaccagatacgcgccatccagctcgccgaccactggctcctccgcgagctgttcggtggttgggtcgggggtttcctccgggggggtggccgcccgtatgcgggcgaacgtgagggtgcacaggagcggggtcagggggtgcgtcacgctccggaggtggacgatcgcgcagtagcggcgctcgcggttaaagaaaaagagggcaaagaaggtgttcgggggcaaccgcagcgccttggggcgcgtcagatacagaaaaatctcgcagaagagggcgcgcccggggtctgggttaggaagggccacctgacacagaggctcggtgaggaccgttagacaccgaaagatcttgagccgctcgtccgcccgaacgacgcgccacacaaagacggagttgacaatgcgcgcgatagagtcgacgtccgtccccaggtcgtcgactctgtcgcgcgtgccgcgagctccggcccgggaatccggccggggcaaggtccccgggggaccaggcggcgccaggggccgccggggtcccagctgcgccatgccgggggcggggggagggcaaaccccagaggcgggggccaacggcgcggggaggagtggatgggcgaggtggccgggggaaggcgcccgctagcgagaacggccgttcccggacgacaccttgcgacaaaacctaaggacagcggcccgcgcgacggggtccgagaggctaaggtaggccgcgatgttaatggtgaacgcaaagccgccgggaaagacaactatgccacagaggcggcgattaaaccccaggcagaggtaggcgtagctttccccgggcaggtattgctcgcagaccctgcgtggggctgtggaggggacggcctccatgaagcgacatttactctgctcgcgtttactgacgtcaccatccatcgccacggcgattggacgattgttaagccgcagcgtgtctccgcttgtgctgtagtagtcaaaaacgtaatggccgtcggagtcggcaaagcgggccgggaggtcgtcgccgagcgggacgacccgccgcccccgaccgccccgtccccccaggtgtgccaggacggccagggcatacgcggtgtgaaaaaaggcgtcgggggcggtcccctcgacggcgcgcatcaggttctcgaggagaatggggaagcgcctggtcacctcccccagccacgcgcgttggtcggggccaaagtcatagcgcaggcgctgtgagattcgcgggccgccctgaagcgcggcccggatggcctggcccagggcccggaggcacgccagatgtatgcgcgcggtaaaggcgacctcggcggcgatgtcaaagggcggcaggacggggcgcgggtggcgcaggggcacctcgagcgcgggaaagcggagcagcagctccgcctgcccagcgggagacagctggtgggggcgcacgacgcgttctgcggcgcaggcctcggtcagggccgtggccagcgccgaggacagcagcggagggcgggcgcgtcgcccgccccacgccactgagttctcgtaggagacgacgacgaagcgctgcttggttccgtagtggtggcgcaggaccacggagatagaacgacggctccacagccagtccggccggtcgccgccggccagggcttcccatccgcgatccaaccactcgaccagcgaccgcggctttgtggtaccaggggtaagggttagaacgtcgttcaggatgtcctcgcccccgggcccgtggggcgctggggccacaaagcggcccccgccggggggctccagacccgccagcaccgcatctgcgtcagccgcccccatggcgcccccgctgacggcctggtgaaccagggcgccctggcggagccccgatgcaacgccacaggccgcacgcccggtccgagcgcggaccgggtggcggcgggtgacgtcctgcactgcccgctgaaccaacgcgaggatctcctcgttctcctgtgcgatggacacgtcctgggccgcggtcgtgtcgccgccgggggccgtcagctgctcctccggggagatgggggggtcggacgccccgacgatgggcgggtctgcgggcgcccccgcgtggggccgggccaagggctgcggacgcggggacgcgctttcccccagacccatggacaggtgggccgcggcctccttcgcggccggcggggcggcggcgccaagcagagcgacgtagcggcacaaatgccgacagacgcgcatgatgcgcgtgctgtcggccgcgtagcgcgtgttgggggggacgagctcgtcgtaactaaacagaatcacgcgggcacagctcgcccccgagccccacgcgaggcgcagcgccgccacggcgtacgggtcatagacgccctgcgcgtcacacaccacgggcagggagacgaacaaccccccggcgctggacgcacgcggaaggaggccagggtgtgccggcacgacgggggccagaagctcccccaccgcatccgcgggcacgtaggcggcaaacgccgtgcaccacggggtacagtcgccggtggcatgagcccgagtctggatttcgacctggaagtttgcggccgtcccgagtccggggcggccgcgcatcagggcggccagagggattcccgcggccgccaggcactcgctggatatgatgacgtgaaccaaagacgagggccgacccgggccgtggccgagatcgtactggacctcgttggccaagtgcgcgttcatggttcggggtgggtgtgggtgtgtaggcgatgcgggtcccccgagtccgcgggaagggcgtgggtttggcgcgcgtatgcgtattcgccaacggaggcgtgcgtgcttatgcgcggcgcgtttcttctgtctccagggaatccgaggccaggactttaacctgctctttgtcgacgaggccaactttattcgcccggatgcggtccagacgattatgggctttctcaaccaggccaactgcaagattatcttcgtgtcgtccaccaacaccgggaaggccagtacgagctttttgtacaacctccgcggggccgccgacgagcttctcaacgtggtgacctatatatgcgatgatcacatgccgagggtggtgacgcacacaaacgccacggcctgttcttgttatatcctcaacaagcccgttttcatcacgatggacggggcggttcgccggaccgccgatttgtttctggccgattccttcatgcaggagatcatcgggggccaggccagggagaccggcgacgaccggcccgttctgaccaagtctgcgggggagcggtttctgttgtaccgcccctcgaccaccaccaacagcggcctcatggcccccgatttgtacgtgtacgtggatcccgcgttcacggccaacacccgagcctccgggaccggcgtcgctgtcgtcgggcggtaccgcgacgattatatcatctttgccctggagcacttttttctccgcgcgctcacgggctcggcccccgccgacatcgcccgctgcgtcgtccacagtctgacgcaggtcctggccctgcatcccggggcgtttcgcggcgtccgggtggcggtcgagggaaatagcagccaggactcggccgtcgccatcgccacgcacgtgcacacagagatgcaccgcctactggcctcggagggggccgacgcgggctcgggccccgagcttctcttctaccactgcgagcctcccgggagcgcggtgctgtacccctttttcctgctcaacaaacagaagacgcccgcctttgaacactttattaaaaagtttaactccgggggcgtcatggcctcccaggagatcgtttccgcgacggtgcgcctgcagaccgacccggtcgagtatctgctcgagcagctgaataacctcaccgaaaccgtctcccccaacactgacgtccgtacgtattccggaaaacggaacggcgcctcggatgaccttatggtcgccgtcattatggccatctaccttgcggcccaggccggacctccgcacacattcgctcccatcacacgcgtttcgtgagcgcccaataaacacacccaggtatgctacgcacgaccacggtgtcgcctgttaaggggggggaagggggtgttggcgggaagcgtgggaacacgggggattctctcacgaccggcaccagtaccacccccctgtgaacacagaaacccaacccaaatcccataaacatacgacacacaggcatattttggaatttcttgggtttttatttatttaggtatgctggggtttctccctggatgcccaccccccacccccccccgtgggtctagccgggccttagggatagcgtataacgggggccatgtctccggaccgcacaacggccgcgccgtcaaaggtgcacacccgaaccacgggagccagggccaaggtgtctcctagttggcccgcgtgggtcagccaggcgacgagcgcctcgtaaagcggcagccttcgctctccatcctgcaccagggccggggcttcggggtgaatgagctgggcggcctcccgcgtgacactctgcatctgcaggagagcgttcacgtacccgtcctgggcacttagcgcaaagagccgggggattagcgtaaggatgatggtggttccctccgtgatcgagtaaaccatgttaaggaccagcgatcgcagctcggcgtttacgggaccgagttgttggacgtccgccagcagcgagaggcgactcccgttgtagtacagcacgttgaggtctggcagccctccggggtttctggggctggggttcaggtcccggatgcccctggccacgagccgcgccacgatttcgcgcgccaggggcgatggaagcggaacgggaaaccgcaacgtgaggtccagcgaatccaggcgcacgtccgtcgcttggccctcgaacacgggcgggacgaggctgatggggtccccgttacagagatctacgggggaggtgttgcgaaggttaacggtgccggcgtgggtgaggcccacgtccagggggcaggcgacgattcgcgtgggaagcacccgggtgatgaccgcggggaagcgccttcggtacgccagcaacaaccccaacgtgtcgggactgacgcctccggagacgaaggattcgtgcgccacgtcggccagcgtcagttgccggcggatggtcggcaggaataccacccgcccttcgcagcgctgcagcgccgccgcatcggggcgcgagatgcccgagggtatcgcgatgtcagtttcaaagccgtccgccagcatggcgccgatccacgcggcagggagtgcagtggtggttcgggtggcgggaggagcgcggtgggggtcagcggcgtagcagagacgggcgaccaacctcgcataggacggggggtgggtcttagggggttgggaggcgacagggaccccagagcatgcgcggggaggtctgtcgggcccagacgcaccgagagcgaatccgtccacggagtcccggtctgggttttatggggcccggccctcggaatcgcggcttgtcggcggggacaaagggggcggggctagggggcttgcggaaacagaagacgcgtgggataaaagaatcgcactaccccaaggaagggcggggcggtttattacagagccagtcccttgagcggggatgcgtcatagacgagatactgcgcgaagtgggtctcccgcgcgtgggcttccccgttgcgggcgctgcggaggagggcggggtcgctggcgcaggtgagcgggtaggcctcctgaaacaggccacacgggtcctccacgagttcgcggcaccccggggggcgcttaaactgtacgtcgctggcggcggtggccgtggacaccgccgaacccgtctccacgatcaggcgctccaggcagcgatgtttggcggcgatgtcggccgacgtaaagaacttaaagcaggggctgagcaccggcgaggccccgttgaggtggtaggccccgttatagagcaggtccccgtacgaaaatcgctgcgacgcccacgggttggccgtggccgcaaaggcccgggacgggtcgctctggccgtggtcgtacatgagggcggtgacatccccctccttgtcccccgcgtaaacgcccccggcggcgcgtccccgggggttgcagggccggcggaagtagttgacgtcggtcgacacgggggtggcgataaactcacacacggcgtcctggccgtggtccatccctgcgcgccgcggcacctgggcgcacccgaacacggggacgggctgggccggccccaggcggtttcccgccacgaccgcgttccgcaggtacacggctgccgcgttgtccaggagagggggagccccgcggcccaggtaaaagttttggggaaggttgcccatgtcggtgacggggttgcggacggttgccgtggccacgacggcggtgtagcccacgcccaggtccacgttcccgcgcggctgggtgagcgtgaagtttacccccccgccagtttcgtgccgggccacctggagctggcccaggaagtacgcctccgacgcgcgctccgagaacagcatgttctcagtcacaaagcggtcctgtcggacgacggtgaacccaaacccgggatggaggcccgtcttgagctgatgatgcaaggccacgggactgatcttgaagtaccccgccatgagcgcgtaggtcagcgcgttctccccggccgcgctctcgcggacgtgctgcacgacgggctgtcggatcgacgaaaagtagttggcccccagagccggggggaccagggggacctgccgcgacaggtcgcgcagggccggggggaaattgggcgcgttcgccacgtggtcggccccggcgaacagcgcgttgacgggaagggggtaaaaatagtcgccattttggatggtatggtccagatgctggggggccatcagcaggattccggcgtgcaacgccccgtcgaatatgcgcatgttggtggtggacgcggtgttggcgcccgcgtcgggcgccgccgagcagagcagcgccgttgtgcgttcggccatgttgtgggccagcacctgcagcgtgagcatggcgggcccgtccactaccacgcgcccgttgtgaaacatggcgttgaccgtgttggccaccagattggccgggtgcagggggtgcgcggggtccgtcacggggtcgctggggcactcctcgccgggggcgatctccgggaccaccatgttctgcagggtggcgtatacgcggtcgaagcgaacccccgcggtgcagcagcggccccgcgagaaggcgggcaccatcacgtagtagtaaatcttgtggtgcacggtccagtccgccccccggtgcggccggtcatccgcggcgtccgcggctcgggcctgggtgttgtgcagcagctggccgtcgttgcggttgaagtccgcggtcgccacgttacatgccgccgcgtacacggggtcgtggccccccgcgctaacccggcagtcgcgatggcggtccagggccgcgcgccgcatcagggcgtcacagtcccacacgaggggtggcagcagcgccgggtctcgcattaggtgattcagctcggcttgcgcctgcccgcccagctccgggccggtcagggtaaagtcatcaaccagctgggccagggcctcgacgtgcgccaccaggtcccggtacacggccatgcactcctcgggaaggtctcccccgaggtaggtcacgacgtacgagaccagcgagtagtcgttcacgaacgccgcgcaccgcgtgttgttccagtagctggtgatgcactggacaacgagccgggccagggcgcagaagacgtgctcgctgccgtgtatggcggcctgcagcaggtaaaacaccgccgggtagttgcggtcgtcgaacgccccgcgaacggcggcgatggtggcgggggccatggcgtggcgtcccacccccagctccaggccccgggcgtcccggaacgccgccggacatagcgccaggggcaagttgccgttcaccacgcgccaggtggcctggatctcccccgggccggccgggggaacgtccccccccggcagctccacgtcggccacccccacgaagaagtcgaacgcggggtgcagctcaagagccaggttggcgttgtcgggctgcataaactgctccggggtcatctggccttccgcgacccatcggacccgcccgtgggccaggcgctgcccccaggcgttcaaaaacagctgctgcatgtctgcggcggggccggccggggccgccacgtacgccccgtacggattggcggcttcgacggggtcgcggttaaggcccccgaccgccgcgtcaacgttcatcagcgaagggtggcacacggtcccgatcgcgtgttccagagacaggcgcagcacctggcggtccttcccccaaaaaaacagctggcggggcgggaaggcgcggggatccgggtggccgggggcggggactaggtccccggcgtgcgcggcaaaccgttccatgaccggattgaacaggcccaggggcaggacgaacgtcaggtccatggcgcccaccagggggtagggaacgttggtggcggcgtagatgcgcttctccagggcctccagaaagaccagcttctcgccgatggacaccagatccgcgcgcacgcgcgtcgtctggggggcgctctcgagctcgtccagcgtctgccggttcaggtcgagctgctcctcctgcatctccagcaggtggcggcccacgtcgtccagacttcgcacggccttgcccatcacgagcgccgtgaccaggttggccccgttcaggaccatctcgccgtacgtcaccggcacgtcggcttcggtgtcctccactttcaggaaggactgcaggaggcgctgtttgatcggggctgtggtgactagcaccccgtcgaccggccgcccgcgcgtgtcggcatgcgtcagacggggcacggccacggagggctgcgtggccgtggtgaggtccacgagccaggcctcgacggcctcccggcggtggcccgccttgcccaggaaaaagctcgtctcgcagaagcttcgctttagctcggcgaccagggtcgcccgggccaccctggtggccaggcggccgttgtccaggtatcgttgcatcggcaacaacaaagccaggggcggcgccttttccagcagcacgtgcagcatctggtcggccgtgccgcgctcaaacgccccgaggacggcctggacgttgcgagcgagctgttggatggcgcgcaactggcgatgcgcgctgatacccgtcccgtccagggcctcccccgtgagcagggcgatggcctcggtggccaggctgaaggcggcgttcagggcccggcggtcgataatcttggtcatgtaattgtgtgtgggttgctcgatggggtgcgggccgtcgcgggcaatcagcggctggtggacctcgaactgtacgcgcccctcgttcatgtaggccagctccggaaacttggtacacacgcacgccaccgacaacccgagctccagaaagcgcacgagcgacagggtgttgcaatacgaccccagcagggcgtcgaactcgacgtcgtacaggctgtttgcatcggagcgcacgcgggaaaaaaaatcgaacaggcgtcgatgcgacgccacctcgatcgtgctaaggagggacccggtcggcaccatggccgtggcataccggtatcccggagggtcgcggttgggagcggccatggggtcgcgtggagatcggctgtctctagcgatattggcccggggaggctaagatccaccccaacgcccggccacccgtgtacgtgcccgacggcccaaggtccaccgaaagacacgacggacccggacccaaagaggcgggggatgctgtgtgagaggccgggtgtcggtcgggggggaaaggcaccgggagaaggctgcggcctcgttccaggagaacccagtgtccccaacagacccggggacgtgggatccccggccttatatacccccccccgccccacccccgttagaacgcgacgggtgcattcaagatggccctggtccaaaagcgtgccaggaagaaattggcagaggcggcaaagctgtccgccgccgccacccacatcgaggccccggccgcacaggctatccccagggcccgtgtgcgcaggggatcggtgggtggcagcatttggttggtggcgataaagtggaaaagcccgtccggactgaaggtctcgtgggcggcggcgaacaaggcacacagggccgtgcctcccaaaaacacggacatcccccaaaacacgggcgccgacaacggcagacgatccctcttgatgttaacgtacaggaggagcgcccgcaccgcccacgtaacgtagtagccgacgatggcggccaggatacaggccggcgccaccacccttccggtcagcccgtaatacatgcccgctgccaccatctccaacggcttcaggaccaaaaacgaccaaaggaacagaatcacgcgctttgaaaagaccggctgggtatggggcggaagacgcgagtatgccgaactgacaaaaaaatcagaggtgccgtacgaggacaatgaaaactgttcctccagcggcagttctccctcctccatggtcatggggtgtgcggtggaggtggggagaccgaaaccgcaaagggtcgcttacgtcagcaggatcccgagatcaaagacacccgggttcttgcacaaacaccacccgggttgcatccgcggaggcgagtgttttgataaggccgttccgcgccttgatataacctttgatgttgaccacaaaacccggaatttacgcctacgccccaatgcccacgcaagatgaggtaggtaacccccccgtgggtgtgacgttgcgtttagttcattggaggccaaggggaaaaatggggtggggaggaaacggaaaacccagtaggccgtgtcgggaacacgcccggggttgtcctcaaaaggcagggtccatactacggaagccgtcgttgtattcgagacctgcctgtgcgacgcacgtcggggttgcctgtgtccggttcggcccccaccgcgtgcggcacgcacgaggacgagtccgcgtgctttattggcgttccaagcgttgccctccagtttctgttgtcggtgttcccccatacccacgcccacatccaccgtagggggcctctgggccgtgttacgtcgccgcccgcgatggagcttagctacgccaccaccatgcactaccgggacgttgtgttttacgtcacaacggaccgaaaccgggcctactttgtgtgcggggggtgtgtttattccgtggggcggccgtgtgcctcgcagcccggggagattgccaagtttggtctggtcgttcgagggacaggcccagacgaccgcgtggtcgccaactatgtacgaagcgaactccgacaacgcggcctgcaggacgtgcgtcccattggggaggacgaggtgtttctggacagcgtgtgtcttctaaacccgaacgtgagctccgagctggatgtgattaacacgaacgacgtggaagtgctggacgaatgtctggccgagtactgcacctcgctgcgaaccagcccgggtgtgctaatatccgggctgcgcgtgcgggcgcaagacagaatcatcgagttgtttgaacacccaacgatagtcaacgtttcctcgcactttgtgtataccccgtccccatacgtgttcgccctggcccaggcgcacctcccccggctcccgagctcgctggaggccctggtgagcggcctgtttgacggcatccccgccccacgccagccacttgacgcccacaacccgcgcacggatgtggttatcacgggccgccgcgccccacgacccatcgccgggtcgggggcggggtcggggggcgcgggcgccaagcgggccaccgtcagcgagttcgtgcaagtcaaacacattgaccgcgtgggccccgctggcgtttcgccggcgcctccgccaaacaacaccgactcgagttccctggtgcccggggcccaggattccgccccgcccggccccacgctaagggagctgtggtgggtgttttatgccgcagaccgggcgctggaggagccccgcgccgactctggcctcacccgcgaggaggtacgtgccgtacgtgggttccgggagcaggcgtggaaactgtttggctccgcgggggccccgcgggcgtttatcggggccgcgttgggcctgagccccctccaaaagctggccgtttactactatatcatccaccgagagaggcgcctgtcccccttccccgcgctagtccggctcgtaggccggtacacacagcgccacggcctgtacgtccctcggcccgacgacccagtcttggccgatgccatcaacgggctggttcgcgacgcgctggcggccggaaccacagccgagcagctcctcatgttcgaccttctccccccaaaggacgtgccggtgggaagcgacgtgcaggccgacagcaccgctctgctgcgctttatagaatcgcaacgtctcgccgtccccgggggggtgatctcccccgagcacgtcgcgtaccttggtgcgttcctgagcgtgctgtacgctggccgcgggcgcatgtccgcagcaacgcacaccgcgcggctgacaggggtgacctccctggtgctagcggtgggtgacgtggaccgtctttccgcgtttgaccgcggagcggcgggcgcggccagccgcacgcgggccgccgggtacctggatgtgcttctgaccgttcgtctcgctcgctccaaacacggacagtctgtgtaacagaccccaataaacgtatgtcgctaccacacccttgtgtgtcaatggacgcctctccgggggggaagggaaaacaaagaggggctgggggagcggcaccactggggcctgaacaaacaaacaaaccacagacacggttacagtttattcggtcgggcggataaacggccgaagccacgccccctttattcgcgtctccaaaaaaacgggacacttgtccggagaacctttaggatgccagccagggcggcggtaatcataaccacgcccagcgcagaggcggccagaaacccgggcgcaattgcggccacgggctgcgtgtcaaaggctagcaaatgaatgacggttccgtttggaaatagcaacaaggccgtggacggcacgtcgctcgaaaacacgctcggggcgccctccgtcggcccggcggcgatttgctgctgtgtgttgtccgtatccaccagcaacacagacatgacctccccggctggggtgtagcgcataaacacggcccccacgagccccaggtcgcgctggttttgggtgcgcaccagccgcttggactcgatatcccgggtggagccttcgcatgtcgcggtgaggtaggttaggaacagtgggcgtcggacgtcgacgccggtgagcttgtagccgatcccccggggcagaggggagtgggtgacgacgtagctggcgttgtgggtgatgggtaccaggatccgtggctcgacgttggcagactgccccccgcaccgatgtgaggcctcagggacgaaggcgcggatcagggcgttgtagtgtgcccagcgcgtcagggtcgaggcgaggccgtgggtctgctgggccaggacttcgaccggggtctcggatcgggtggcttgagccagcgcgtccaggataaacacgctctcgtctagatcaaagcgcagggaggccgcgcatggcgaaaagtggtccggaagccaaaagagggttttctggtggtcggcccgggccagcgcggtccggaggtcggcgttggtcgctgcggcgacgtcggacgtacacagggccgatgctatcagaaggctccggcgggcgcgttcccgctgcaccgccgaggggacgcccgccaagaacggctgccggaggacagccgaggcgtaaaatagcgcccggtggacgaccggggtggtcagcacgcggccccctagaaactcggcatacagggcgtcgatgagatgggctgcgctgggcgccactgcgtcgtacgccgaggggctatccagcacgaaggccagctgatagcccagcgcgtgtaatgccaagctctgttcgcgctccagaatctcggccaccaggtgctggagccgagcctctagctgcaggcgggccgtgggatccaagactgacacattaaaaaacacagaatccgcggcacagcccgcggccccgcgggcggccaacccggcaagcgcgcgcgagtgggccaaaaagcctagcaggtcggagaggcagaccgcgccgtttgcgtgggcggcgttcacgaaagcaaaacccgacgtcgcgagcagccccgttaggcgccagaagagaggggggcgcgggccctgctcggcgcccgcgtcccccgagaaaaactccgcgtatgcccgcgacaggaactgggcgtagttcgtgccctcctccgggtagccgcccacgcggcggagggcgtccagcgcggagccgttgtcggcccgcgtcagggaccctaggacaaagacccgataccgggggccgcccgggggcccgggaagagcccccggggggttttcgtccgcggggtccccgacccgatctagcgtctggcccgcggggaccaccatcacttccaccggagggctgtcgtgcatggatatcacgagccccatgaattcccgcccgtagcgcgcgcgcaccagcgcggcatcgcacccgagcaccagctcccccgtcgtccagatgcccacgggccacgtcgaggccgacggggagaaatacacgtacctacctggggatctcaacaggccccgggtggccaaccaggtcgtggacgcgttgtgcaggtgcgtgatgtccagctccgtcgtcgggtgccgccgggccccaaccggcggtcgggggggcggtgtatcacgcggcccgcttgggtggctcgccgtcgccacgttgtctccccgcgggaacgtcagggcctcggggtcagggacggccgaaaacgttacccaggcccgggaacgcagcaacacggaggcgactggattgtacaagagacccttaaggggggcgaccgaggggggaggctgggcggtcggctcgaccgtggtgggggcgggcaggctcgcgttcgggggccggccgagcaggtaggtcttcgggatgtaaagcagctggccggggtcccgcggaaactcggccgtggtgaccaatacaaaacaaaagcgctcctcgtaccagcgaagaaggggcagagatgccgtagtcaggtttagttcgtccggcggcgccagaaatccgcgcggtggtttttgggggtcgggggtgtttggcagccacagacgcccggtgttcgtgtcgcgccagtacatgcggtccatgcccaggccatccaaaaaccatgggtctgtctgctcagtccagtcgtggacctgaccccacgcaacgcccaaaataataacccccacgaaccataaaccattccccatgggggaccccgtccctaacccacggggcccgtggctatggcagggcttgccgccccgacgttggctgcgagccctgggccttcacccgaacttggggggtggggtggggaaaaggaagaaacgcgggcgtattggccccaatggggtctcggtggggtatcgacagagtgccagccctgggaccgaaccccgcgtttatgaacaaacgacccaacacccgtgcgttttattctgtctttttattgccgtcatagcgcgggttccttccggtattgtctccttccgtgtttcagttagcctcccccatctcccgggcaaacgtgcgcgccaggtcgcagatcgtcggtatggagccgggggtggtgacgtgggtctggaccatcccggaggtaagttgcagcagggcgtcccggcagccggcgggcgattggtcgtaatccaggataaagacgtgcatgggacggaggcgtttggccaagacgtccaaggcccaggcaaacacgttgtacaggtcgccgttgggggccagcaactcgggggcccgaaacagggtaaataacgtgtccccgatatggggtcgtgggcccgcgttgctctggggctcggcaccctggggcggcacggccgtccccgaaagctgtccccaatcctcccgccacgacccgccgccctgcagataccgcaccgtattggcaagcagcccgtaaacgcggcgaatcgcggccagcatagccaggtcaagccgctcgccggggcgctggcgtttggccaggcggtcgatgtgtctgtcctccggaagggcccccaacacgatgtttgtgccgggcaaggtcggcgggatgagggccacgaacgccagcacggcctggggggtcatgctgcccataaggtatcgcgcggccgggtagcacaggagggcggcgatgggatggcggtcgaagatgagggtgagggccgggggcggggcatgtgagctcccagcctcccccccgatatgaggagccagaacggcgtcggtcacggcataaggcatgcccattgttatctgggcgcttgtcattaccaccgccgcgtccccggccgatatctcaccctggtcgaggcggtgttgtgtggtgtagatgttcgcgattgtctcggaagcccccagcacctgccagtaagtcatcggctcgggtacgtagacgatatcgtcgcgcgaacccagggccaccagcagttgcgtggtggtggttttccccatcccgtgaggaccctctatataaacccgcagtagcgtgggcattttctgctccaggcggacttccgtggcttcttgctgccggcgagggcgcaacgccgtacgtcggttgctatggccgcgagaacgcgcagcctggtcgaacgcagacgcgtattgatggcaggggtacgaagccatacgcgcttctacaaggcgcttgccgaagaggtgcgggagtttcacgccaccaagatctgcggcacgctgttgacgctgttaagcgggtcgctgcagggtcgctcggtgttcgaggccacacgcgtcaccttaatatgcgaagtggacctgggaccgcgccgccccgactgcatctgcgtgttcgaattcgtgaatgacaagacgctgggcggggtttgtgtcatcatagaactaaagacatgcaaatatatttcttccggggacaccgccagcaaacgcgagcaacgggccacggggatgaagcagctgcgccactccctgaagctcctgcagtccctcgcgcctccgggtgacaagatagtgtacctgtgccccgtcctggtgtttgtcgcccaacggacgctccgcgtcagccgcgtgacccggctcgtcccgcagaaggtctccggtaatatcaccgcagtcgtgcggatgctccagagcctgtccacgtatacggtccccatggagcctaggacccagcgagcccgtcgccgccgcggcggcgccgcccgggggtctgcgagcagaccgaaaaggtcacactctggggcgcgcgacccgcccgagtcagcggcccgccagttaccacccgccgaccaaacccccgcctccacggagggcgggggggtgcttaagaggatcgcggcgctcttctgcgtgcccgtggccaccaagaccaaaccccgagccgcctccgaatgagagtgtttcgttccttccccctccccccgcgtcagacaaaccctaaccaccgcttaagcggcccccgcgaggtccgaagactcatttggatccggcgggagccacccgacaacagcccccgggttttcccacgccagacgccggtccgctgtgccatcgcgccccctcatcccaccccccatcttgtccccaaataaaacaaggtctggtagttaggacaacgaccgcagttctcgtgtgttattttcgctctccgcctctcgcagatggacccgtactgcccatttgacgctctggacgtctgggaacacaggcgcttcatagtcgccgattcccgaaacttcatcacccccgagttcccccgggacttttggatgtcgcccgtctttaacctcccccgggagacggcggcggagcaggtggtcgtcctacaggcccagcgcacagcggctgccgctgccctggagaacgccgccatgcaggcggccgagctccccgtcgatatcgagcgccggttacgcccgatcgaacggaacgtgcacaagatcgcaggcgccctggaggcgctggagacggcggcggccgccgccgaagaggcggatgccgcgcgcggggatgagccggcgggtgggggcgacgggggggcgcccccgagtctggccgtcgcggagatggaggtccagatcgtgcgcaacgacccgccgctacgatacgacaccaacctccccgtggatctgctacacatggtgtacgcgggccgcggggcgaccggatcgtcgggggtggtgttcgggacctggtaccgcactatccaggaccgcaccatcacggactttcccctgaccacccgcagtgccgactttcgggacggccgtatgtccaagaccttcatgacggcgctggtactgtccctgcagtcgtgcggccggctgtatgtgggccagcgccactattccgccttcgagtgcgccgtgttgtgtctctacctgctgtaccgaaacacgcacggggccgccgacgatagcgaccgcgctccggtcacgttcggggatctgctgggccggctgccccgctacctggcgtgcctggccgcggtgatcgggaccgagggcggccggccacagtaccgctaccgcgacgacaagctccccaagacgcagttcgcggccggcgggggccgctacgaacacggagcgctggcgtcgcacatcgtgatcgccacgctgatgcaccacggggtgctcccggcggccccgggggacgtcccccgggacgcgagcacccacgttaaccccgacggcgtggcgcaccacgacgacataaaccgcgccgccgccgcgttcctcagccggggccacaacctattcctgtgggaggaccagactctgctgcgggcaaccgcgaacaccataacggccctgggcgttatccagcggctcctcgcgaacggcaacgtgtacgcggaccgcctcaacaaccgcctgcagctgggcatgctgatccccggagccgtcccttcggaggccatcgcccgtggggcctccgggtccgactcgggggccatcaagagcggagacaacaatctggaggcgctatgtgccaattacgtgcttccgctgtaccgggccgacccggcggtcgagctgacccagctgtttcccggcctggccgccctgtgtcttgacgcccaggcggggcggccggtcgggtcgacgcggcgggtggtggatatgtcatcgggggcccgccaggcggcgctggtgcgcctcaccgccctggaactcatcaaccgcacccgcacaaaccccacccccgtgggggaggttatccacgcccacgacgccctggcgatccaatacgaacaggggcttggcctgctggcgcagcaggcacgcattggcttgggctccaacaccaagcgtttctccgcgttcaacgttagcagcgactacgacatgttgtactttttatgtctggggttcattccacagtacctgtcggcggtttagtgggtggtgggcgaggggggagggggcattagggagaaagaacaagagcctccgttgggttttctttgtgcctgtactcaaaaggtcataccccgtaaacggcgggctccagtcccggcccggcggttggcgtgaacgcaacggcgggagctgggttagcgtttagtttagcattcgctctcgcctttccgcccgccccccgaccgttgcgccttttttttttttcgtccaccaaagtctctgtgggtgcgcgcatggcagccgatgccccgggagaccggatggaggagcccctgccagacagggccgtgcccatttacgtggctgggtttttggccctgtatgacagcggggactcgggcgagttggcattggatccggatacggtgcgtgcggccctgcctccggataacccactcccgattaacgtggaccaccgcgctggctgcgaggtggggcgggtgctggccgtggtcgacgacccccgcgggccgttttttgtgggactgatcgcctgcgtgcaactggagcgcgtcctcgagacggccgccagcgctgcgattttcgagcgccgcgggccgccgctctcccgggaggagcgcctgttgtacctgatcaccaactacctgccctcggtctccctggccacaaaacgcctggggggcgaggcgcaccccgatcgcacgctgttcgcgcacgtcgcgctgtgcgcgatcgggcggcgcctcggcactatcgtcacctacgacaccggtctcgacgccgccatcgcgccctttcgccacctgtcgccggcgtctcgcgagggggcgcggcgactggccgccgaggccgagctcgcgctgtccggacgcacctgggcgcccggcgtggaggcgctgacccacacgctgctttccaccgccgttaacaacatgatgctgcgggaccgctggagcctggtggccgagcggcggcggcaggccgggatcgccggacacacctacctccaggcgagcgaaaaattcaaaatgtggggggcggagcctgtttccgcgccggcgcgcgggtataagaacggggccccggagtccacggacataccgcccggctcgatcgctgccgcgccgcagggtgaccggtgcccaatcgtccgtcagcgcggggtcgcctcgcccccggtactgccccccatgaaccccgttccggcatcgggcaccccggcccccgcgccgcccggcgacgggagctacctgtggatcccggcctcccattacaaccagctcgtcgccggccacgccgcgccccaaccccagccgcattccgcgtttggtttcccggctgcggcgggggccgtggcctatgggcctcacggcgcgggtctttcccagcattaccctccccacgtcgcccatcagtatcccggggtgctgttctcgggacccagcccactcgaggcgcagatagccgcgttggtgggggccatagccgcggaccgccaggcgggcggtcagacggccgcgggagaccctggggtccgggggtcgggaaagcgtcgccggtacgaggcggggccgtcggagtcctactgcgaccaggacgaaccggacgcggactacccgtactaccccggggaggctcgaggcgggccgcgcggggtcgactctcggcgcgcggcccgccagtctcccgggaccaacgagaccatcacggcgctgatgggggcggtgacgtctctgcagcaggaactggcgcacatgcgggctcggaccagcgccccctatggaatgtacacgccggtggcgcactatcgccctcaggtgggggagccggaaccaacaacgacccacccggccctttgtcccccggaggccgtgtatcgccccccaccacacagcgccccctacggtcctccccagggtccggcgtcccatgcccccactcccccgtatgccccagctgcctgcccgccaggcccgccaccgcccccatgtccttccacccagacgcgcgcccctctaccgacggagcccgcgttcccccccgccgccaccggatcccaaccggaggcatccaacgcggaggccggggcccttgtcaacgccagcagcgcagcacacgtggacgttgacacggcccgcgccgccgatttgttcgtctctcagatgatgggggcccgctgattcgccccggtctttggtaccatgggatgtcttactgtatatctttttaaataaaccaggtaataccaaataagacccattggtgtatgttctttttttattgggaggcgcgggtaggcgggtagctttacaatgcaaaagccttcgacgtggaggaaggcgtggggggggaatcggcactgaccaagggggtccgttttgtcacgggaaaggaaagaggaaacaggccgcggacacccgggggagtttatgtgttcccttttctttcttcccacacacacaaaaggcgtaccaaacaaacaaaccaaaagatgcacatgcggtttaacacccgtggtttttatttacaacaaaccccccgtcacaggtcgtcctcgtcggcgtcaccgtctttgttgggaacttgggtgtagttggtgttgcggcgcttgcgcatgaccatgtcggtgaccttggcgctgagcagcgcgctcgtgcccttcttcttggccttgtgttccgtgcgctccatggcagacaccagggccatgtaccgtatcatctcccgggcctcggctagcttggcctcgtcaaagtcgccgccctcctcgccctccccggacgcgtccgggttggtggggttcttgagctccttggtggttagcgggtacagggccttcatggggttgctctgcagccgcatgacgtagcgaaaggcgaagaaagccgccgccaggccggccaggaccaacagacccacggccagcgccccaaaggggttggacatgaaggaggacacgcccgacacggccgataccacgccgcccacgatgcccatcaccaccttgccgaccgcgcgccccaggtcgcccatcccctcgaagaacgcgcccaggcccgcgaacatggcggcgttggcgtcggcgtggatgaccgtgtcgatgtcggcgaagcgcaggtcgtgcagctggttgcggcgctggacctccgtgtagtccagcaggccgctgtccttgatctcgtgtcgggtgtacacctccagggggacaaactcgtgatcctccagcatggtgatgttgaggtcgatgaaggtgctgacggtggtgatgtcggcgcggctcagctggtgggagtacgcgtactcctcgaagtacacgtagcccccgccgaaggtgaagtagcgccggtgtcccacggtgcacggctcgatcgcatcgcgcgtcagccgcagctcgttgttctcccccagctgcccctcgaccaacgggccctggtcttcgtaccgaaagctgaccagggggcggctgtagcaggccccgggccgcgagctgatgcgcatcgagttttggacgatcacgttgtccgcggcgaccggcacgcacgtggagacggccatcacgtcgccgagcatccgcgcgctcacccgccggcccacggtggccgaggcgatggcgttggggttcagcttgcgggcctcgttccacagggtcagctcgtgattctgcagctcgcaccacgcgatggcaacgcggcccaacatatcgttgacatggcgctgtatgtggttgtacgtaaactgcagccgggcgaactcgatggaggaggtggtcttgatgcgctccacggacgcgttggcgctggccccgggcggcgggggcgtggggtttgggggcttgcggctctgctctcggaggtgttcccgcacgtacagctccgcgagcgtgttgctgagaaggggctggtacgcgatcagaaagcccccattggccaggtagtactgcggctggcccaccttgatgtgcgtcgcgttgtacctgcgggcgaagatgcggtccatggcgtcgcgggcgtccttgccgatgcagtcccccaggtccacgcgcgagagcgggtactcggtcaggttggtggtgaaggtggtggatatggcgtcggaggagaatcggaaggagccgccgtactcggagcgcagcatctcgtccacctcctgccacttggtcatggtgcagaccgacgggcgctttggcacccagtcccaggccacggtgaacttgggggtcgtgagcaggttccgggtggtcggcgccgtggcccgggccttggtggtgaggtcgcgcgcgtagaagccgtcaacctgcttgaagcggtcggcggcgtagctggtgtgttcggtgtgcgacccctcccggtagccgtaaaacggggacatgtacacaaagtcgccagtcgccagcacaaactcgtcgtacgggtacaccgagcgcgcgtccacctcctcgacgatgcagtttaccgtcgtcccgtaccggtggaacgcctccacccgcgaggggttgtacttgaggtcggtggtgtgccagccccggctcgtgcgggtcgcggcgttggccggtttcagctccatgtcggtctcgtggtcgtcccggtgaaacgcggtggtctccaggttgttgcgcacgtacttggccgtggaccgacagacccccttggcgttgatcttgtcgatcacctcctcgaaggggacgggggcgcggtcctcaaagatccccataaactgggagtagcggtggccgaaccacacctgcgaaacggtgacgtctttgtagtacatggtggccttgaacttgtacggggcgatgttctccttgaagaccaccgcgatgccctccgtgtagttctgaccctcgggccgggtcgggcagcggcgcggctgctcgaactgcaccaccgtggcgcccgtggggggtgggcacacgtaaaagtttgcatcggtgttctccgccttgatgtcccgcaggtgctcgcgcagggtggcgtggcccgcggcgacggtcgcgttgtcgccggcggggcgcggcggcggtgggtttttcggttttttgttcttcttcggtttcgtgtcccccgttggggcggggccaggggcgggcggcgccggagtggcaggtcccccgttcgccgcctgggtcgcggccgcgaccccaggcgtgccgggggaactcggagccgccgacgccaccaggacccccagcgtcaaccccaagagcgcccatacgacgaaccaccggcacccccgcgcgggggcgccctggcgcatggcgggactacgggggcccgtcgtgccccccgtcaggtagcctgggggcgaggtgctggaggaccgagtagaggatcgagaaaacgtctcggtcgtagaccacgaccgaccgggggccgatacagccgtcgggggcgctctcgacgatggccaccagcggacagtcggagtcgtacgtgagatatacgccgggcgggtaacggtaacgaccttcggaggtcgggcggctgcagtccgggcggcgcaactcgagctccccgcaccggtagaccgaggcaaagagtgtggtggcgataatcagctcgcgaatatatcgccaggcggcgcgctgagtgggcgttattccggaaatgccgtcaaaacagtaaaacctctgaaattcgctgacggcccaatcagcacccgagccccccgcccccatgatgaaccgggcgagctcctccttcaggtgcggcaggagccccacgttctcgacgctgtaatacagcgcggtgttggggggctgggcgaagctgtgggtggagtgatcaaagaggggcccgttgacgagctcgaagaagcgatgggtgatgctggggagcagggccgggtccacctggtgtcgcaggagagacgctcgcatgaaccggtgcgcgtcgaacacgcccggcgccgagcggttgtcgatgaccgtgcccgcgcccgccgtcagggcgcagaagcgcgcgcgcgccgcaaagccgttggcgaccgcggcgaacgtcgcgggcagcacctcgccgtggacgctgacccgcagcatcttctcgagctccccgcgctgctcgcggacgcagcgccccaggctggccaacgaccgcttcgtcaggcggtccgcgtacagccgccgtcgctcccgcacgtccgcggccgcttgcgtggcgatgtccccccacgtctcgggcccctgccccccgggcccgcggcgacggtcttcgtcctcgcccccgcccccgggagctcccaacccccgtgccccttcctctacggcgacacggtccccgtcgtcgtcggggcccgcgccgcccttgggcgcgtccgccgcgccccccgcccccatgcgcgccagcacgcgacgcagcgcctcctcgtcgcactgttcggggctgacgaggcgccgcaagagcggcgtcgtcaggtggtggtcgtagcacgcgcggatgagcgcctcgatctgatcgtcgggtgacgtggcctgaccgccgattattagggcgtccaccatatccagcgccgccaggtggctcccgaacgcgcgatcgaaatgctccgcccgccgcccgaacagcgccagttccacggccaccgcggcggtctcctgctgcaactcgcgccgcgccagcgcggtcaggttgctggcaaacgcgtccatggtggtctggccggcgcggtcgccggacgcgagccagaatcgcaattcgctgatggcgtacaggccgggcgtggtggcctgaaacacgtcgtgcgcctccagcagggcgtcggcctccttgcggaccgagtcgttctcgggcgacgggtggggctgcccgtcgccccccgcggtccgggccagcgcatggtccaacacggagagcgcccgcgcgcggtcggcgtccgacagcccggcggcgtggggcaggtaccgccgcagctcgttggcgtccagccgcacctgcgcctgctgggtgacgtggttacagatacggtccgccaggcggcgggcgatcgtcgccccctggttcgccgtcacacacagttcctcgaaacagaccgcgcaggggtgggacgggtcgctaagctccggggggacgataaggcccgaccccaccgcccccaccataaactcccgaacgcgctccagcgcggcggtggcgccgcgcgagggggtgatgaggtggcagtagtttagctgctttagaaagttctcgacgtcgtgcaggaaacacagctccatatggacggtcccgccatacgtatccagcctgacccgttggtgatacggacagggtcgggccaggcccatggtctccgtgaaaaacaccgcgacgtctcccgcggtcgcgaacgtctccaggctgcccaggagccgctcgccctcgcgccacgcgtactctagcagcaactccagggtgaccgacagcggggtgagaaaggccccggcctgggcctccaggcccggcctcagacgacgccgcagcgcccgcacctgaagcgcgttcagcttcagttgggggagcttcccccgtccgatgtgggggtcgcaccgccggagcagctctatctgaaacacataggtctgcacctgtccgagcagggctaacaacttttgacgggccacggtgggctcggacaccggggcggccatctcgcggcgccgatctgtaccgcggccggagtatgcggtggaccgaggcggtccgtacgctacccggcgtctggctgagccccggggtccccctattcggggcggcctcccgcgggcccgccgaccggcaagccgggagtcggcggcgcgtgcgtttctgttctattcccagacaccgcggagaggaatcacggcccgcccagagatatagacacggaacacaaacaagcacggatgtcgtagcaataatttattttacacacattccccgccccgccctaggttcccccaccccccaacccctcacagcatatccaacgtcaggtctccctttttgtcggggggcccctccccaaacgggtcatccccgtggaacgcccgtttgcggccggcaaatgccggtcccggggcccccgggccgccgaacggcgtcgcgttgtcgtcctcgcagccaaaatccccaaagttaaacacctccccggcgttgccgagttggctgactagggcctcggcctcgtgcgccacctccagggccgcgtccgtcgaccactcgccgttgccgcgctccagggcacgtgcggtcagctccatcatctcctcgcttaggtactcgtcctccaggagcgccagccagtcctcgatctgcagctgttgggtgcggggccccaggcttttcacggtcgccacgaacacgctactggcgacggccgccccgccctcggagataatgccccggagctgctcgcacagcgagctttcgtgcgctccgccgccgaggctcgaggccgcgcacacaaacccggcccggggacaggccaggacgaacttgcgggtgcggtcaaaaataaggagcgggcacgcgtttttgccgcccatcaggctggcccagttcccggcctgaaacacacggtcgttgccggccatgccgtagtatttgctgatgctcaaccccaacacgaccatggggcgtgccgccatgacgggccgcagcaggttgcagctggcgaacatggaggtccacgcgcccggatgcgcgtccacggcgtccatcagcgcgcgggccccggcctccaggcccgccccgccctgcgcggaccacgcggccgccgcctgcacgctggggggacggcgggaccccgcgatgatggccgtgagggtgttgatgaagtacgtcgagtgatcgcagtaccgcagaatctggtttgccatgtagtacatcgccagctcgctcacgttgttgggggccaggttaataaagttgatcgcgccgtagtccagggaaaactttttaatgaacgcgatggtctcgatgtcctcgcgcgacaggagccgggcgggaagctggttgcgttggagggccgtccagaaccactgcgggttcggctggttggaccccgggggcttgccgttggggaagatggccgcgtggaactgcttcagcagaaagcccagcggtccgaggaggatgtccacgcgcttgtcgggcttctggtaggcgctctggaggctggcgacccgcgccttggcggcctcggacgcgttggcgctcgcgcccgcgaacaacacgcggctcttgacgcgcagctccttgggaaaccccagggtcacgcgggcaacgtcgccctcgaagctgctctcggcgggggccgtctggccggccgtcaggctgggggcgcagatagccgcaccctccgagagcgcgaccgtcagcgttttggccgacagaaacccgttgttaaacatgtccatcacgcgccgccgcagcaccggttggaattgattgcgaaagttgcgcccctcgaccgactgcccggcgaacaccccgtggcactggctcagggccaggtcctggtacacggcgaggttggatcgccgcccgagaagctgaagcagggggcacggcccgcacgcgtacgggtccagcgtcagggacatggcgtggttggcctcgcccagaccgtcgcgaaacttgaagttcctcccctccaccaggttgcgcatcagctgctccacctcgcggtccacgacctgcctgacgttgttcaccaccgtatgcagggcctcgcggttggtgatgatggtctccagccgccccatggccgtggggaccgcctggtccacgtactgcagggtctcgagttcggccatgacgcgctcggtcgccgcgcggtacgtctcctgcatgatggtccgggcggtctcggatccgtccgcgcgcttcagggccgagaaggcggcgtagtttcccagcacgtcgcagtcgctgtacatgctgttcatggtcccgaagacgccgatggctccgcgggcggcgctggcgaacttgggatggcgcgcccggaggcgcatgagcgtcgtgtgtacgcaggcgtggcgcgtgtcgaaggtgcacaggttacagggcacgtcggtctggttggagtccgcgacgtatcgaaacacgtccatctcctggcgcccgacgatcacgccgccgtcgcagcgctccaggtaaaacagcatcttggccagcagcgccggggaaaacccacacagcatggccaggtgctcgccggcaaattcctgggttccgccgacgaggggcgcggtgggccgaccctcgaacccgggcaccacgtgtccctcgcggtccacctgtgggttggccgccacgtgggtcccgggcacgaggaagaagcggtaaaaggagggtttgctgtggtcctttgggtccgccgggccggcgtcgtccacctcggtgagatggagggccgagttggtgctaaataccatggcccccacgagtcccgcggcgcgcgccaggtacgccccgacggcgttggcgcgggccgcggccgtgtcctggccctcgaacagcggccacgcggagatgtcggtgggcggctcgtcaaagacggccatcgacacgatagactcgagggccagggcggcgtctccggccatgacggaggccaggcgctgttcgaacccgcccgcagggcccttgccgccgccgtcgcgcccgccccgcggggtcttaccctggctggcttcgaaggccgtgaacgtaatgtcggcggggagggcggcgccctcgtggttttcgtcaaacgccaggtgggcggccgcgcgggccacggcgtccacgtttcggcatcgcagtgccacggcggcgggtcccacgaccgcctcgaacaggaggcggtggagggggcggttaaaaaacggaagcgggtaggtaaaattctccccgatcgatcggtggttggcgttgaacggctctgcgatgacacggctaaaatccggcatgaacagctgcaacgggtacacgggtatgcggtgcacctccgccccgcctatggttaccttgtccgagcctcccaggtgcagaaaggtgttgttgatgcacacggcctccttgaagccctcggtaacgaccagatacaggagggcgcggtccgggtccaggccgaggcgctcacacagcgcctcccccgtcgtctcgtgtttgaggtcgccgggccggggggtgtagtccgaaaagccaaaatggcggcgtgcccgctcgcagagtcgcgtcaggttcggggcctgggtgctggggtccaggtgccggccgccgtgaaagacgtacacggacgagctgtagtgcgagggcgtcagtttcagggacaccgcggtacccccgagccccgtcgtgcgagaacccacgaccacggccacgttggcctcaaagccgctctccacggtcaggcccacgaccaggggcgccacggcgacgtcggcatcgccgctgcgcgccgacagtaacgccagaagctcgatgccttcggacggacacgcgcgagcgtacacgtatcccaggggcccgggggggaccttgatggtggttgccgtcttgggctttgtctccatgtccttctgtcaatcggtccgcgaacggaggtaatcccggcacgacgacggacgcccgacaaggtatgtctcccgagcgtcaaaatccgggggggggggcggcgacggtcaaggggagggttggagaccggggttggggaatgaatccctacccttcaccgacaaccccccgggtaatcacggggtgccgatgaaccccggcggccggcaacgcggggtccctgcgagaggcacagatgcttacggtcaggtgctccgggtcgggtgcgtctggtatgcggttggtatatgtacactttacctgggggcgtgcctggccgccccagcccctcccacgccctgcgcgtcatcagccggtgggcgtggccgctattataaaaaaagtgagaacgcgaagcgttcgcactttgtcctaataatatatatattattaggacaaagtgcgaacgcttcgcgttctcactttttttataatagcggccacgcccaccggctacgtcacgctcctgtcggccgccggcggtccataagcccggccggccgggccgacgcgaataaaccgggccgccggccggggcgccgcgcagcagctcgccgcccggatccgccagacaaacaaggcccttgcacatgccggcccgggcgagcctgggggtccggtaattttgccatcccacccaagcggctttttgggtttttctcttcccccctccccacatcccccctctttaggggttcgggtggtaacaaccgcgatgttttccggtggcggcggcccgctgtcccccggaggaaagtcggcggccagggcggcgtccgggttttttgcgcccgccggccctcgcggagccggccggggacccccgccttgcttgaggcaaaacttttacaacccctacctcgccccagtcgggacgcaacagaagccgaccgggccaacccagcgccatacgtactatagcgaatgcgatgaatttcgattcatcgccccgcgggtgctggacgaggatgcccccccggagaagcgcgccggggtgcacgacggtcacctcaagcgcgcccccaaggtgtactgcgggggggacgagcgcgacgtcctccgcgtcgggtcgggcggcttctggccgcggcgctcgcgcctgtggggcggcgtggaccacgccccggcggggttcaaccccaccgtcaccgtctttcacgtgtacgacatcctggagaacgtggagcacgcgtacggcatgcgcgcggcccagttccacgcgcggtttatggacgccatcacaccgacggggaccgtcatcacgctcctgggcctgactccggaaggccaccgggtggccgttcacgtttacggcacgcggcagtacttttacatgaacaaggaggaggtcgacaggcacctacaatgccgcgccccacgagatctctgcgagcgcatggccgcggccctgcgcgagtccccgggcgcgtcgttccgcggcatttccgcggaccacttcgaggcggaggtggtggagcgcaccgacgtgtactactacgagacgcgccccgctctgttttaccgcgtctacgtccgaagcgggcgcgtgctgtcgtacctgtgcgacaacttctgcccggccatcaagaagtacgagggtggggtcgacgccaccacccggttcatcctggacaaccccgggttcgtcaccttcggctggtaccgtctcaaaccgggccggaacaacacgctagcccagccgcgggccccgatggccttcgggacatccagcgacgtcgagtttaactgtacggcggacaacctggccatcgaggggggcatgagcgacctaccggcatacaagctcatgtgcttcgatatcgaatgcaaggcggggggggaggacgagctggcctttccggtggccgggcacccggaggacctggtcatccagatatcctgtctgctctacgacctgtccaccaccgccctggagcacgtcctcctgttttcgctcggttcctgcgacctccccgaatcccacctgaacgagctggcggccaggggcctgcccacgcccgtggttctggaattcgacagcgaattcgagatgctgttggccttcatgacccttgtgaaacagtacggccccgagttcgtgaccgggtacaacatcatcaacttcgactggcccttcttgctggccaagctgacggacatttacaaggtccccctggacgggtacggccgcatgaacggccggggcgtgtttcgcgtgtgggacataggccagagccacttccagaagcgcagcaagataaaggtgaacggcatggtgaacatcgacatgtacgggattataaccgacaagatcaagctctcgagctacaagctcaacgccgtggccgaagccgtcctgaaggacaagaagaaggacctgagctatcgcgacatccccgcctactacgccgccgggcccgcgcaacgcggggtgatcggcgagtactgcatacaggattccctgctggtgggccagctgttttttaagtttttgccccatctggagctctcggccgtcgcgcgcttggcgggtattaacatcacccgcaccatctacgacggccagcagatccgcgtctttacgtgcctgctgcgcctggccgaccagaagggctttattctgccggacacccaggggcgatttaggggcgccgggggggaggcgcccaagcgtccggccgcagcccgggaggacgaggagcggccagaggaggagggggaggacgaggacgaacgcgaggagggcgggggcgagcgggagccggagggcgcgcgggagaccgccggccggcacgtggggtaccagggggccagggtccttgaccccacttccgggtttcatgtgaaccccgtggtggtgttcgactttgccagcctgtaccccagcatcatccaggcccacaacctgtgcttcagcacgctctccctgagggccgacgcagtggcgcacctggaggcgggcaaggactacctggagatcgaggtgggggggcgacggctgttcttcgtcaaggctcacgtgcgagagagcctcctcagcatcctcctgcgggactggctcgccatgcgaaagcagatccgctcgcggattccccagagcagccccgaggaggccgtgctcctggacaagcagcaggccgccatcaaggtcgtgtgtaactcggtttacgggttcacgggagtgcagcacggactcctgccgtgcctgcacgttgccgcgacggtgacgaccatcggccgcgagatgctgctcgcgacccgcgagtacgtccacgcgcgctgggcggccttcgaacagctcctggccgatttcccggaggcggccgacatgcgcgcccccgggccctattccatgcgcatcatctacggggacacggactccatctttgtgctgtgccgcggcctcacggccgccgggctgacggccgtgggcgacaagatggcgagccacatctcgcgcgcgctgtttctgtcccccatcaaactcgagtgcgaaaagacgttcaccaagctgctgctgatcgccaagaaaaagtacatcggcgtcatctacgggggtaagatgctcatcaagggcgtggatctggtgcgcaaaaacaactgcgcgtttatcaaccgcacctccagggccctggtcgacctgctgttttacgacgataccgtatccggagcggccgccgcgttagccgagcgccccgcagaggagtggctggcgcgacccctgcccgagggactgcaggcgttcggggccgtcctcgtagacgcccatcggcgcatcaccgacccggagagggacatccaggactttgtcctcaccgccgaactgagcagacacccgcgcgcgtacaccaacaagcgcctggcccacctgacggtgtattacaagctcatggcccgccgcgcgcaggtcccgtccatcaaggaccggatcccgtacgtgatcgtggcccagacccgcgaggtagaggagacggtcgcgcggctggccgccctccgcgagctcgacgccgccgccccaggggacgagcccgccccccccgcggccctgccctccccggccaagcgcccccgggagacgccgttgcatgccgaccccccgggaggcgcgtccaagccccgcaagctgctggtgtccgagctggccgaggatcccgcatacgccattgcccacggcgtcgccctgaacacggactattacttctcccacctgttgggggcggcgtgcgtgacattcaaggccctgtttgggaataacgccaagatcaccgagagtctgttaaaaaggtttattcccgaagtgtggcaccccccggacgacgtggccgcgcggctccgggccgcagggttcggggcggtgggtgccggcgctacggcggaggaaactcgtcgaatgttgcatagagcctttgatactctagcatgagccccccgtcgaagctgatgtccctcattttacaataaatgtctgcggccgacacggtcggaatctccgcgtccgtgggtttctctgcgttgcgccggaccacgagcacaaacgtgctctgccacacgtgggcgacgaaccggtaccccgggcacgcggtgagcatccggtctatgagccggtagtgcaggtgggcggacgtgccgggaaagatgacgtacagcatgtggcccccgtaagtggggtccgggtaaaacaacagccgcgggtcgcacgccccgcctccgcgcaggatcgtgtggacgaaaaaaagctcgggttggccaagaatcccggccaagaggtcctggaggggggcgttgtggcggtcggccaacacgaccaaggaggccaggaaggcgcgatgctcgaatatcgtgttgatctgctgcacgaaggccaggattagggcctcgcggctggtggcggcgaaccgcccgtctcccgcgttgcacgcgggacagcaacccccgatgcctaggtagtagcccatcccggagagggtcaggcagttgtcggccacggtctggtccagacagaagggcagcgagacgggagtggtcttcaccaggggcaccgagagcgagcgcacgatggcgatctcctcggagggcgtctgggcgagggcggcgaaaaggccccgatagcgctggcgctcgtgtaaacacagctcctgtttgcgggcgtgaggcggcaggctcttccgggaggcccgacgcaccacgcccagagtcccgccggccgcagaggagcgcgaccgccggcgctccttgccgtgatagggcccgggccgggagccgcggcgatgggggtcggtgtcatacataggtacacagggtgtgctccagggacaggagcgagatcgagtggcgtctaagcagcgcgcccgcctcacggacaaatgtggcgagcgcggtgggctttggtacaaatacctgatacgtcttgaaggtgtagatgagggcacgcaacgctatgcagacacgcccctcgaactcgttcccgcaggccagcttggccttgtggagcagcagctcgtcgggatgggtggcggggggatggccgaacagaacccaggggtcaacctccatctccgtaatggcgcacatggggtcacagaacatgtgcttaaagatggcctcgggccccgcggcccgaagcaggctcacaaaccggcccccgtccccgggctgcgtctcggggtcagcctcgagctggtcgacgacgggtacgatacagtcgaagaggctcgtgttgttttccgagtagcggaccacggaggcccggagtctgcgcagggccagccagtaagcacgcaccagtaacaggttacacagcaggcattctccgccggtgcgcccgcgcccccggccgtgtttcagcacggtggccatcagagggcccaggtcgaggtcgggctgggcatcgggttcggtaaactgcgcaaagcgcggagccacgtcgcgcgtgcgtgccccgcgatgcgcttcccaggactggcggaccgtggcgcgacgggcctccgcggcagcgcgcagctggggccccgactcccagacggcgggggtgccggcgaggagcagcaggaccagatccgcgtacgcccacgtatccggcgactcctccggctcgcggtccccggcgaccgtctcgaattccccgttgcgagcggcggcgcgcgtacagcagctgtccccgcccccgcgccgaccctccgtgcagtccaggagacgggcgcaatccttccagttcatcagcgcggtggtgagcgacggctgcgtgccggatcccgccgaccccgccccctcctcgcccccggaggccaaggttccgatgagggcccgggtggcagactgcgccaggaacgagtagttggagtactgcaccttggcggctcccggggagggcgagggcttgggttgcttctgggcatgccgcccgggcaccccgccgtcggtacggaagcagcagtggagaaaaaagtgccggtggatgtcgtttatggtgagggcaaagcgtgcgaaggagccgaccagggtcgccttcttggtgcgcagaaagtggcggtccatgacgtacacaaactcgaacgcggccacgaagatgctagcggcgcagtggggcgcccccaggcatttggcacagagaaacgcgtaatcggccacccactgaggcgagaggcggtaggtttgcttgtacagctcgatggtgcggcagaccagacagggccggtccagcgcgaaggtgtcgatggccgccgcggaaaagggcccggtgtccaaaagcccctccccacagggatccgggggcgggttgcggggtcctccgcgcccgcccgaaccccctccgtcgcccgcccccccgcgggcccttgagggggcggtgaccacgtcggcggcgacgtcctcgtcgagcgtaccgacgggcggcacacctatcacgtgactggccgtcaggagctcggcgcagagagcctcgttaagagccaggaggctgggatcgaaggccacatacgcgcgctcgaacgcccccgccttccagctgctgccgggggactcttcgcacaccgcgacgctcgccaggaccccggggggcgaagttgccatggctgggcgggaggggcgcacgcgccagcgaactttacgggacacaatccccgactgcgcgctgcggtcccagaccctggagagtctagacgcgcgctacgtctcgcgagacggcgcgcatgacgcggccgtctggttcgaggatatgacccccgccgagctggaggttgtcttcccgactacggacgccaagctgaactacctgtcgcggacgcagcggctggcctccctcctgacgtacgccgggcctataaaagcgcccgacgacgccgccgccccgcagaccccggacaccgcgtgtgtgcacggcgagctgctcgcccgcaagcgggaaagattcgcggcggtcattaaccggttcctggacctgcaccagattctgcggggctgacgcgcgtgctgttgggcgggacggttcgcgaaccctttggtgggtttacgcgggcacgcacgctcccatcgcgggcgccatggcgggactgggcaagccctacaccggccacccaggtgacgccttcgagggtctcgttcagcgaattcggcttatcgtcccatctacgttgcggggcggggacggggaggcgggcccctactctccctccaacctcccctccaggtgcgcctttcagtttcatggccatgacgggtccgacgagtcgtttcccatcgagtatgtactgcggcttatgaacgactgggccgaggtcccgtgcaacccttacctgcgcatacagaacaccggcgtgtcggtgctgtttcaggggttttttcatcgcccacacaacgcccccgggggcgcgattacgccagagcggaccaatgtgatcctggggtccaccgagacgacggggttgtccctcggcgacctggacaccatcaaggggcggctcggcctggatgcccggccgatgatggccagcatgtggatcagctgctttgtgcgcatgccccgcgtgcagctcgcgtttcggttcatgggccccgaagatgccggacggacgagacggatcctgtgccgcgccgccgagcaggctattacccgtcgccgccgaacccggcggtcccgggaggcgtacggggccgaggccgggctgggggtggccggaacgggtttccgggccaggggggacggttttggcccgctccccttgttaacccaagggccctcccgcccgtggcaccaggccctgcggggtcttaagcacctacggattggcccccccgcgctcgttttggcggcgggactcgtcctgggggccgctatttggtgggtggttggtgctggcgcgcgcctataaaaaaggacgcaccgccgccctaatcgccagtgcgttccggacgccttcgccccacacagccctcccgaccgacacccccatatcgcttcccgacctccggtcccgatggccgtcccgcaatttcaccgccccagcaccgttaccaccgatagcgtccgggcgcttggcatgcgcgggctcgtcttggccaccaataactctcagtttatcatggataacaaccacccacacccccagggcacccaaggggccgtgcgggagtttctccgcggtcaggcggcggcactgacggaccttggtctggcccacgcaaacaacacgtttaccccgcagcctatgttcgcgggcgacgcaccggccgcctggttgcggcccgcgtttggcctgcggcgcacctattcaccttttgtcgttcgagaaccttcgacgcccgggaccccgtgaggcccagggagttccttctggggtgttttaatcaataaaagaccacaccaacgcacgagccttgcgtttaatgtcgtgtttattcaagggagtgggatagggttcgacggttcgaaacttaacacaccaaataatcgagcgcgtctagcccagtaacatgcgcacgtgatgtaggctggtcagcacggcgtcgctgtgatgaagcagcgcccggcgggtccgctgtaactgctgttgtaggcggtaacaggcgcggatcagcaccgccagggcgctacgaccggtgcgttgcacgtagcgtcgcgacagaactgcgtttgccgatacgggcggggggccgaattgtaagcgcgtcacctcttgggagtcatcggcggataacgcactgaatggttcgttggttatgggggagtgtggttccccagggagtgggtcgagcgcctcggcctcggaatccgagaggaacaacgaggtggcgtcggagtcttcgtcgtcagagacatacagggtctgaagcagcgacacgggcgggggggtagcgtcgatgtgtagcgcgagggaggatgcccacgaagacaccccagacaaggagctgcccgtgcgtggatttgtggaagacgcggaagccgggacggatgggcggttttgcggtgcccggaaccgaaccgccggatactccccgggtgctacatgcccgttttggggctggggttggggctggggttggggctggggttggggctggggttggggctggggttggggctggggttggggttggggttggggctggggttggggttggggctggggctggggctggggctggggctggggctggggctggggctggggctggggctggggctggggctggggctggggctggggctggggctggggttggggcgcggacaggcggctgacggtcaaatgcccccgggggcgcgcagatgtggtgggcgtggccaccggctgccgtgtagtggggcggcgggaaaccgggcctccgggcgtaacaccgccctccagcgtcaagtatgtggggggcgggcctgacgtcgggggcggggtgacgggttggaccgcgggaggcgggggagagggacctgcgggagaggatgaggtcggctcggccgggttgcggcctaaaacaggggccgtggggtcggcggggtcccagggtgaagggagggattcccgcgattcggacagcgacgcgacagcggggcgcgtaaggcgccgctgcggcccgcctacgggaaccctggggggggttggcgcgggacccgaggttagcggggggcggcggttttcgcccccgggcaaaaccgtgccggttgcgaccgggggcggaacgggatcgatagggagagcgggagaagcctggccggcggactggggaccgagcgggaggggcacaccagacaccaaagcgtggggcgctggctctgggggtttgggaggggccggggggcgcgcgaaatcggtaaccggggcgaccgtgtcggggagggcaggcggccgccaaccctgggtggtcgcggaagcctgggtggcgcgcgccagggagcgtgcccggcggtgtcggcgcgcgcgcgacccggacgaagaagcggtagaagcgcgggaggaggcgggggggcggggggcggtggcatcggggggcgccggggaactttggggggacggcaagcgccggaagtcgtcgcgggggcccacgggcgccggccgcgtgctttcggccgggacgcccggtcgtgcttcgcgagccgtgactgccggcccagggggccgcggtgcacactgggacgtggggacggactgatcggcggtgggcgaaagggggtccggggcaaggaggggcgcggggccgccggagtcgtcagacgcgagctcctccaggccgtgaatccatgcccacatgcgaggggggacgggctcgccgggggtggcgtcggtgaatagcgtgggggccaggcttccgggccccaacgagccctccgccccaacaaggtccgccgggccgggggtcgggttcgggaccgaggggctctggtcgtcgggggcgcgctggtacaccggatgccccgggaatagctcccccgacaggagggaggcgtcgaacggccgcccgaggatagctcgcgcgaggaaggggtcctcgtcggtggcgctcgcggcgaggacgtcctcgccgcccgccacaaacgggagctcctcggtggcctcgctgccaacaaaccgcatgtcgggggggccgggggggtccgggttttcccacaacaccgcgaccggggtcatggagatgtccacgagcaccaggcacggcgggccccgggcgaggggccgctcggcgatgagcgcggacaggcgcgggagctgtgccgccagacacgcgttttcgatcgggttaaggtcggcgtgcaggaggcggacggcccacgtctcgatgtcggacgacacggcatcgcgcaaggcggcgtccggcccgcgagcgcgtgagtcaaacagcgtgaggcacagctccagttccgactcgcgggaaaaggccgtggtgttgcggagcgccacgacgacgggcgcgcccaggagcactgccgccagcaccaggtccatggccgtaacgcgcgccgcgggggtgcggtgggtggcggcggccggcacggcgacgtgctggcccgtgggccggtagagggcgttggggggagcggggggtgacgcctcgcgcccccccgaggggctcagcgtctgcccagattccagacgcgcggtcagaagggcgtcgaaactgtcatactctgtgtagtcgtccggaaacatgcaggtccaaagagcggccagcgcggtgcttgggagacacatgcgcccgaggacgctcaccgccgccagcgcctgggcgggactcagctttcccagcgcggcgccgcgctcggttcccagctcggggaccgagcgccagggcgccagggggtcggtttcggacaacttgccgcggcgccagtctgccagccgcgtgccgaacatgaggccccgggtcggagggcctccggccgaaaacgctggcagcacgcggatgcgggcgtctggatgcggggtcaggcgctgcacgaatagcatggaatctgctgcgttctgaaacgcacgggggagggtgagatgcatgtactcgtgttggcggaccagatccaggcgccaaaaggtgtaaatgtgttccggggagctggccaccagcgccaccagcacgtcgttctcgttaaaggaaacgcggtgcctagtggagctctggggtccgagcggcggccccggggccgccgcgtcacccccccattccagctgggcccagcgacacccaaactcgcgcgtgagagtggtcgcgacgagggcgacgtagagctcggccgccgcatccatcgaggccccccatctcgcctggcggtggcgcacaaagcgtccgaagagctgaaagttggcggcctgggcgtcgctgagggccagctgaagccggttgatgacggtgaggacgtacatggccgtgacggtcgaggccgactccagggtgtccgtcggaagcggggggcgaatgcatgccgcctcgggacacatcagcagcgcgccgagcttgtcggtcacggccgggaagcagagcgcgtactgcagtggcgttccatccgggaccaaaaagctgggggcgaacggcctatccagcgtactggtggcctcgcgcagcaccaggggccccgggcctccgctcactcgcaggtacgcctcgccccggcggcgcagcatctgcgggtcggcctcttggccgggtggggcggacgcccgggcgcgggcgtctagggcgcgaagatccacgagcaggggcgcgggcgcggccgccgcgcccgcgcccgtctggcctgtggccttggcgtacgcgctatataagcccatgcggcgttggatgagctcccgcgcgccccggaactcctccaccgcccatggggccaggtccccggccaccgcgtccaattccgccaacaggccccccagggtgtcaaagttcatctcccaggccacccttggcaccacctcgtcccgcagccgggcgctcaggtcggcgtgttgggccacgcgccccccgagctcctccacggccccggcccgctcggcgctcttggcgcccaggacgccctggtacttggcgggaaggcgctcgtagtcccgctgggctcgcagccccgacacagtgttggtggtgtcctgcagggcgcgaagctgctcgcatgccgcgcgaaatccctcgggcgatttccaggcccccccgcgaacgcggccgaagcgaccccatacctcgtcccactccgcctcggcctcctcgaaagacctccgcagggcctcgacgcggcgacgggtgtcgaagagcgactgcaggcgcgcgccctgtcgcgtcaggaggcccgggccgtcgccgctggccgcgcttagcgggtgcgtctcaaaggtgcgctgggcatgttccaaccaggcgaccgcctgcacgtcgagctcgcgcgccttctccgtctggtccaacagaatctcgacctgatccgcgatctcctccgccgagcgcgcctggtccagcgtcttggccacggtcgccgggacggcaaccaccttcagcagggtcttcagattggccagaccctcggcctcgagctgggcccggcgctcgcgcgcggccagcacctcccgcaaccccgccgtgacccgctcggtggcttcggcgcgctgctgtttggcgcgcaccacggcgtccttggtatcggccaggtcctgtcgggtcacgaatgcgacgtagtcggcgtacgccgtgtccttcacggggctctggtccacgcgctccagcgccgccacacacgccaccagcgcgtcctcgctcgggcagggcagggtgacccctgcccggacaagctcggcggccgccgccgggtcgttgcgcaccgcggatatctcctccgcggcggcggccaggtccagcgccacgcttccgatcgcgcgccgcgcgtcggcccggagggcgtccaggcgatcgcggatatccacgtactcggcgtagcccttttgaaaaaacggcacgtactggcgcagggccggcacgccccccaagtcttccgacaggtgtaggacggcctcgtggtagtcgataaacccgtcgttcgcctgggcccgctccagcagcccccccgcgagccgcagaagccgcgccaggggctcggtgtccacccgaaacatgtcggcgtacgtgtcggccgcggccccgaaggccgcgctccagtcgatgcggtgaatggctgcgagcggggggagcatggggtggcgctggttctcgggggtgtatgggttaaacgcaagggccgtctccagggcaagggtcaccgccttggcgttggttcccagcgcctgctcggcccgctttcggaagtcccgggggttgtagccgtgcgtgcccgccagcgcctgcaggcgacggagctcgaccacgtcaaactcggcaccgctttccacgcggtccagcacggcctccacgtcggcggcccagcgctcgtggctactgcgggcgcgctgggccgccatcttctctctgaggtcggcggtggcggcctcaagttcgtcggcgcggcgtcgcgtggcgccgatgacctttcccagctcctgcagggcgcgcccgctgggggagtggtccccggccgtcccttcggcgtgcaacaggcccccgaacctgccctcgtggcccgcgaggctttcccgcgcgccggtggtcgcgcgcgtcgcggcctggatcagggaggcatgctctccctccggttggttggcggcccggcgcacctggacgacaaggtcggcggcagccgaccctaaggtcgtgagctgggcgatggccccccgcgcgtccagggccaaccgagtcgccttgacgtatcccgcggcgctgtcggccatggccgctaggaaggccaggggggaggccgggtcgctggcggccgcgcccagggccgtcactgcgtcgaccaggacgcggtgcgcccgcacggccgcatccaccgtcgacgcggggtctgccgtcgcgacggcggcgctgccggcgttgatggcgttcgagacggcgtgggctatgatcggggcgtgatcggcgaagaactgcaagagaaacggagtctcgggggcgttggcgaacaggttcttcagcaccaccacgaagctgggatgcaagccggacagagccgtcgccgtgtccggagtcgggtgctccagggcatctcggtactgccccagcagcccccacatgtccgcccgcagcgccgccgtaacctccgggggcgccccccgaacggcctcggggaggtccgaccagcccgccggcagggaggcccgcagggtcgtcaggacggccggacaggcctttagccccacaaagtcagggaggggccgcaggaccccctggagtttgtgcaagaacttctcccgggcgtcgcgggccaccttcgcccgctcccgcgctccctcgagcattgcctccagggagcgcgcgcgctcccgcaaacgggcacgcgcatcgggggcgagctctgccgtcagcttggcggcatccatggcccgcgcctgccgcagcgcttcctcggccatgcgcgtggcctctggcgacagcccgccgtcgtcggggtagggcgacgcgccgggcgcaggaacaaaggccgcgtcgctgtccagctgctggcccagggccgcatctagggcgtcgaagcgccgcagctcggccagacccgagctgcggcgcgcctgctggtcgttaatgtcgcggatgctgcgcgccagctcgtccagcggcttgcgttctatcagcccttggttggcggcgtccgtcaggacggagagccaggccgccaggtcctcgggggcgtccagcgtctggccccgctgtatcagatcccgcaacaggatggccgtggggctggtcgcgatcgggggcggggcgggaatggcggcgctctgcgcgatgtcccgcgtgtgctggtcgaagacaggcagggactctagcagctggaccacgggcacgacggcggccgaagccacgtgaaaccggcggtcgttgttgtcgctggcctgcagagccttggcgctgtatacggccccccggtaaaagtactccttaaccgcgccctcgatcgcccgacgggcctgggtccgcacctcctccagccgaacctgaacggcctcggggcccagggggggtgggcgcggagccccctgcggggccgccccggccggggcgggcattacgccgaggggcccggcgtgctgtgagaccgcgtcgaccccgcgagcgagggcgtcgagggcctcgcgcatctggcgatcctccgcctccaccctaatctcttcgccacgggcaaatttggccagagcctggactctatacagaagcggttctgggtgcgtcggggtggcgggggcaaaaagggtgtccgggtgggcctgcgagcgctccagaagccactcgccgaggcgtgtatacagattggccggcggggccgcgcgaagctgcagctccaggtccgcgagttccccgtaaaaggcgtccgtctcccgaatgacatccctagccacaaggatcagcttcgccagcgccaggcgaccgatcagagagttttcgtccagcacgtgctggacgaggggcagatgggcggccacgtcggccaggctcaggcgcgtggaggccagaaagtcccccacggccgttttccggggcagcatgctcagggtaaactccagcagggcggcggccgggccggccaccccggcctgggtgtgcgtccgggccccgttctcgatgagaaaggcgaggacgcgttcaaagaaaaaaataacacagagctccagcagccccggagaagccggatacggcgaccgtaaggcgctgatggtgagccgcgaacacgcggcgacctcgcgggccagggcggcggagcacgcggtgaacttaaccgccgtggcggccacgtttgggtgggcctcgaacagctgggcaaggtctgcgcccgggggctcgggtgagcggcgagtcttcagcgcctcgagggcctgcgaggacgccggaaccgtgggcccgtcgtcctcgcccgcctcggcgaccggcggcccggccgggtcggggggtgccgaggcgaggacaggctccggaacggaggcggggaccgcggccccgacgggggttttgcctttgggggtggatttcttcttggttttggcagggggggccgagcgtttcgttttctcccccgaagtcaggtcttcgacgctggaaggcggagtccaggtgggtcggcggcgcttgggaaggccggccgagtagcgtgcccggtgccgaccaaccgggacgacgcccatctccaggacccgcatgtcgtcgtcatcttcttcggccgcctctgcggcggggggcttgggggcggagggaggcggtggtgggatcgcggagggtgggtcggcggaggggggatccgtgggtggggtacccttcagggccaccgcccatacatcgtcgggcgcccgattcgggcgcttggcctctggttttgccgacggaccggccgtcccccgggatgtctcggaggccctgtcgtcgcgacgggcccgggtcggtggcggcgactgggcggctgtgggcgggtggggccccgtgccccctaccccctcccgggggcccacgccgacgcagggctcccccaggcccgcgatctcgccccgcagggggtgcgtgatggccacgcgccgttcgctgaacgcttcgtcctgcaggtaagtctcgctggccccgtaaagatgcagagccgcggccgtcaagtccgcaggagccgcgggttccgggcccgacggcacgaaaaacaccatggctcccgcccaccgtacgtccgggcgatcgcgggtgtaatacgtcaggtatggatacatgtcccccgcccgcactttggcgatgaacgcgggggtgccctccggaaggccgtgcgggtcaaaaaggtatgcggtgtcgccgtccctgaacagccccatccctagggggccaatggttaggagcgtgtacgacagggggcgcagggcccacgggccggcgaagaacgtgtgtgcggggcattgtgtctccagcaggcccgccgcgggctccccgaagaagcccacctcgccgtatacgcgcgagaagacacagcgcagtccgccgcgcgcccctgggtactcgaggaagttggggagctcgacgatcgaacacatgcgcggcggcccagggcccgcggtcgcgcgcgtccactcgcccccctcgaccaaacaaccctcgatggcctccgcggacagaacgtcgcgagggcccacatcaaatatgaggctgagaaaggacagcgacgagcgcatgcacgataccgacccccccggctccaggtcgggcgcgaactggttccgagcaccggtgaccacgatgtcgcgatcccccccgcgttccatcgtggagtgcggtggggtgcccgcgatcatatgtgccctactggccagagacccggcctgtttatggaccggacccccggggttagtgttgtttccgccacccatgcccccgtaccatggccccggttcccctgattaggctacgagtcgcggtgatcgcttcccaaaaaccgagctgcgtttgtctgtcttgatctttcccccccccgcccgcccgcccgcccgcacaccataacaccgagaacaacacacgggggtgggcgtaacataataaagctttattggtaactagttaacggcaagtccgtgggtggcgcgacggtgtcctccgggctcatctcgtcgtcctcgacgggggtgttggaatgaggcgccccctcgcggtccgcctggcgtgggccgtgcccataggcctccggcttctgtgcgtccatgggcataggcgcggggagactgtttccggcgtcgcggacctccaggtccctgggagactccggtccggctaacggacgaaacgcggaagcgcgaaacacgccgtcggtgacccgcaggagctcgttcatcagtaaccaatccatactcagcgtaacggccagcccctggcgagacagatccacggagtccggaaccgcggtcgtctggcccagggggccgaggctgtagtccccccaggcccctaggtcgcgacggctcgtaagcacgacgcggtcggccgcggggctttgcgggggggcgtcctcgggcgcatgcgccattacctctcggatggccgcggcgcgctggtcggccgagctgaccaagggcgccacgaccacggcgcgctccgtctgcaggcccttccacgtgtcgtggagttcctggacaaactcggccacgggctcgggtcccgcggccgcgcgcgcggcttgatagcaggccgagagacgccgccagcgcgctagaaactgacccatgaagcaaaacccggggacctggtctcccgacagcagcttcgacgcccgggcgtgaatgccggacacgacggacagaaacccgtgaatttcgcgccggaccacggccagcacgttgtcctcgtgcgacacctgggccgccagctcgtcacacacccccaggtgcgccgtggtttcggtgatgacggaacgcaggctcgcgagggacgcgaccagcgcgcgcttggcgtcgtgatacatgctgcagtactgactcaccgcgtcccccatggcctcggggggccagggccccaggcggtcgggcgtgtccccgaccaccgcatacaggcggcgcccgtcgctctcgaaccgacactcgaaaaaggcggagagcgtgcgcatgtgcagccgcagcagcacgatggcgtcctccagttggcgaatcagggggtctgcgcgctcggcgaggtcctgcagcaccccccgggcggccagggcgtacatgctaatcaacaggaggctggtgcccacctcggggggcggggggggctgcagctggaccaggggccgcagctgctcgacggcacccctggagatcacgtacagctcccggagcagctgctctatgttgtcggccatctgcatagtggggccgaggccgccccgggcggccggttcgaggagggtaatcagcgcgcccagtttggtgcgatggccctcgaccgtggggagatagcccagcccaaaatcccgggcccaggccaacacacgcagggcgaactcgaccgggcgtggaaggtaggccgcgctacacgtggccctcaacgcgtccccgaccaccagggccagaacgtaggggacgaagcccgggtcggcgaggacgttggggtgaatgccctcgagggcggggaagcggatctgggtcgccgcggccaggtggacagagggggcgtggctgggctgcccgacggggagaagcgcggacagcggcgtggccggggtggtgggggtgatgtcccagtgggtctgaccatacacgtcgatccagatgagcgccgtctcgcggagaaggctgggttgaccggaactaaagcggcgctcggccgtctcaaactcccccacgagcgcccgccgcaggctcgccagatgttccgtcggcacggccggacccatgatacgcgccagcgtctggctcagaacgccccccgacaggccgaccgcctcgcagagccgcccgtgcgtgtgctcgctggcgccctggacccgcctgaaagtttttacgtagttggcatagtacccgtattcccgcgccagaccaaacacgttcgaccccgcgagggcaatgcacccaaagagctgctggacttcgccgagtccgtggccggcgggcgtccgcgcggggacgcccgccgccagaaacccctccagggccgaaaggtagtgcgtgcagtgcgagggcgtgaacccagcgtcgatcagggtgttgatcaccacggagggcgaattggtattctggatcaacgtccacgtctgctgcaacagagccaacagccgctgctgggcgccggcggagggctgctccccgagctgcagcaggctggagacggcaggctggaagactgccagtgccgacgaactcaggaacggcacgtcgggatcaaacacggccacgtccgtccgcacgcgcgccattagcgtccccgggggcgcacaggccgagcgcgggctgacgcggctgagggccgtcgacacgcgcacctcctcgcggctgcgaaccatcttgttggcctccagtggcggaatcattatggccgggtcgatctcccgcacggtgtgctgaaactgcgccaacaggggcggcgggaccacagccccccgctcgggggtcgtcaggtactcgtccaccagggccaacgtaaagagggcccgtgtgaggggagtgagggtcgcgtcgtctatgcgctggaggtgcgccgagaacagcgtcacccgattactcaccagggccaagaaccggaggccctcttgcacgaacggggcggggaagagcaggctgtacgccggggtggtaaggttcgcgctgggctgccccaacgggaccggcgccatcttgagcgacgtctccccaagggcctcgatggaggtccgcgggctcatggccaagcagctcttggtgacggtttgccagcggtctatccactccacggcgcactggcggacgcggaccggccccagggccgccgcggtgcgcaggccggcggaatccagcgcatgggacgtgtcggagccggtgaccgcgaggatggtgtccttgatgacctccatctcccggaaggcctggtcgggggcctcggggagagccaccaccaagcggtgtacgagcaacccggggaggttctcggccaagagcgccgtctccggaagcccgtgggcccggtggagcgcgcacaggtgttccagcagcggccgccagcatgcccgcgcgtctgccggggcgatggccgttcccgacaacagaaacgccgccatggcggcgcgcagcttggccgtggccagaaacgccgggtcgtccgccccgtttgccgtctcggccgtgggggttggcggttggcgaaggccggctaggctcgccaataggcgctgcataggtccgtccgagggcggaccggcgggtgaggtcgtgacgacgggggcctcggacgggagaccgcggtctgccatgacgcccggctcgcgtgggtgggggacagcgtagaccaacgacgagaccgggcgggaatgactgtcgtgcgctgtagggagcggcgaattatcgatcccctgcggccctccaggaaccccgcaggcgttgcgagtaccccgcgtcttcgcggggtgttatacggccacttaagtcccggcatcccgttcgcggacccaggcccgggggattgtccggatgtgcgggcagcccggacggcgtgggttgcggactttctgcggggcggcccaaatggccctttaaacgtgtgtatacggacgcgccgggccagtcggccaacacaacccaccggaggcggtagccgcgtttggctgtggggtgggtggttccgccttgcgtgagtgtcctttcgacccccccctcccccgggtcttgctaggtcgcgatctgtggtcgcaatgaagaccaatccgctacccgcaaccccttccgtgtggggcgggagtaccgtggaactcccccccaccacacgcgataccgcggggcagggcctgcttcggcgcgtcctgcgccccccgatctctcgccgcgacggcccagtgctccccagggggtcgggaccccggagggcggccagcacgctgtggttgcttggcctggacggcacagacgcgccccctggggcgctgacccccaacgacgataccgaacaggccctggacaagatcctgcggggcaccatgcgcgggggggcggccctgatcggctccccgcgccatcatctaacccgccaagtgatcctgacggatctgtgccaacccaacgcggatcgtgccgggacgctgcttctggcgctgcggcaccccgccgacctgcctcacctggcccaccagcgcgccccgccaggccggcagaccgagcggctgggcgaggcctggggccagctgatggaggcgaccgccctggggtcggggcgagccgagagcgggtgcacgcgcgcgggcctcgtgtcgtttaacttcctggtggcggcgtgtgccgcctcgtacgacgcgcgcgacgccgccgatgcggtacgggcccacgtcacggccaactaccgcgggacgcgggtgggggcgcgcctggatcgtttttccgagtgtctgcgcgccatggttcacacgcacgtcttcccccacgaggtcatgcggtttttcggggggctggtgtcgtgggtcacccaggacgagctagcgagcgtcaccgccgtgtgcgccgggccccaggaggcggcgcacaccggccacccgggccggccccgctcggccgtgatcctcccggcgtgtgcgttcgtggacctggacgccgagctggggctggggggcccgggcgcggcgtttctgtacctggtattcacttaccgccagcgccgggaccaggagctgtgttgtgtgtacgtgatcaagagccagctccccccgcgcgggttggagccggccctggagcggctgtttgggcgcctccggatcaccaacacgattcacggcaccgaggacatgacgcccccggccccaaaccgaaaccccgacttccccctcgcgggcctggccgccaatccccaaaccccgcgttgctcggctggccaggtcacgaacccccagttcgccgacaggctgtaccgctggcagccggaccttcgggggcgccccaccgcacgcacctgtacgtacgccgcctttgcagagctcggcatgatgcccgaggatagtccccgctgcctgcaccgcaccgagcgctttggggcggtcagcgtccccgttgttattctggaaggcgtggtgtggcgccccggcgagtggcgggcatgcgcgtgagcgtagcaaacgccccgcccacacaacgctccgcccccaaccccttccccgctgtcactcgtggttcgttgacccggacgtccgccaaataaagccactgaaacccgaaacgcgagtgttgtaacgtcctttgggcgggaggaagccacaaaatgcaaatgggatacatggaaggaacacacccccgtgactcaggacatcggcgtgtccttttgggtttcactgaaactggcccgcgccccacccctgcgcgatgtggataaaaagccagcgcgggtggtttagggtaccacaggtgggtgctttggaaacttgtcggtcgccgtgctcctgtgagcttgcgtccctccccggtttcctttgcgctcccgccttccggacctgctctcgcctatcttctttggctgtcggtgcgattcgtcaggcagcggccttgtcgaatctcgaccccaccactcgccggacccgccgacgtcccctctggagcccgccgaaacccgccgcgtctgttgaaatggccagccgcccagccgcatcctctcccgtcgaagcgcgggccccggttgggggacaggaggccggcggccccagcgcagccacccagggggaggccgccggggcccctctcgcccacggccaccacgtgtactgccagcgagtcaatggcgtgatggtgctttccgacaagacgcccgggtccgcgtcctaccgcatcagcgatagcaactttgtccaatgtggttccaactgcaccatgattatcgacggagacgtggtgcgcgggcgcccccaggacccgggggccgcggcatcccccgctcccttcgttgcggtgacaaacatcggagccggcagcgacggcgggaccgccgtcgttgcattcgggggaaccccacgtcgctcggcggggacgtctaccggtacccagacggccgacgtcccagccgaggcccttgggggcccccctcctcctccccgcttcaccctgggtggcggctgttgctcctgtcgcgacacacggcgccgctctgcggtattcgggggggagggggatcccgtcggccccgcggagttcgtctcggacgaccggtcgtccgattccgactcggatgactcggaggacaccgactcggagacgctgtcacacgcctcctcggacgtgtccggcggggccacgtacgacgacgcccttgactccgattcgtcatcggatgactccctgcagatagatggccccgtgtgtcgcccgtggagcaatgacaccgcgcccctggatgtttgccccgggacccccggcccgggcgccgacgccggtggtccctcagcggtagacccacacgcgccgacgacaggggccggcgctggtcttgcggccgatcccgccgtggcccgggacgacgcggaggggctttcggacccccggccacgtctgggaacgggcacggcctaccccgtccccctggaactcacgcccgagaacgcggaggccgtggcgcgctttctgggagatgccgtgaaccgcgaacccgcgctcatgctggagtacttttgccggtgcgcccgcgaggaaaccaagcgtgtcccccccaggacattctgcagcccccctcgcctcacggaggacgactttgggcttctcaactacgcgctcgtggagatgcagcgcctgtgtctggacgttcctccggtcccgccgaacgcatacatgccctattatctcagggagtatgtgacgcggctggtcaacgggttcaagccgctggtgagccggtccgctcgcctttaccgcatcctgggggttctggtgcacctgcggatccggacccgggaggcctcctttgaggagtggctgcgatccaaggaagtggccctggactttggcctgacggaaaggcttcgcgagcacgaagcccagctggtgatcctggcccaggttctggaccattacgactgtctgatccacagcacaccgcacacgctggtcgagcgggggctgcaatcggccctgaagtatgaggagttttacctaaagcgctttggcgggcactacatggagtccgtcttccagatgtacacccgcatcgccggctttttggcctgccgggccacgcgcggcatgcgccacatcgccctggggcgagaggggtcgtggtgggaaatgttcaagttctttttccaccgcctctacgaccaccagatcgtaccgtcgacccccgccatgctgaacctggggacccgcaactactacacctccagctgctacctggtaaacccccaggccaccacaaacaaggcgaccctgcgggccatcaccagcaacgtcagtgccatcctcgcccgcaacgggggcatcgggctatgcgtgcaggcgtttaacgactccggccccgggaccgccagcgtcatgcccgccctcaaggtcctcgactcgctggtggcggcgcacaacaaagagagcgcgcgtccgaccggcgcgtgcgtgtacctggagccgtggcacaccgacgtgcgggccgtgctccggatgaagggggtcctcgccggcgaagaggcccagcgctgcgacaatatcttcagcgccctctggatgccagacctgtttttcaagcgcctgattcgccacctggacggcgagaagaacgtcacatggaccctgttcgaccgggacaccagcatgtcgctcgccgactttcacggggaggagttcgagaagctctaccagcacctcgaggtcatggggttcggcgagcagatacccatccaggagctggcctatggcattgtgcgcagtgcggccacgaccgggagccccttcgtcatgttcaaagacgcggtgaaccgccactacatctacgacacccagggggcggccatcgccggctccaacctctgcaccgagatcgtccatccggcctccaagcgatccagtggggtctgtaatctgggaagcgtgaatctggcccgatgcgtctccaggcagacgtttgactttgggcggctccgcgacgccgtgcaggcgtgcgtgctgatggtgaacatcatgatcgacagcacgctacaacccacgccccagtgcacccgcggcaacgacaacctgcggtccatgggaatcggcatgcagggcctgcacacggcctgcctgaagctggggctggatctggagtctgccgaatttcaggacctgaacaaacacatcgccgaggtgatgctgctgtcggcgatgaagaccagcaacgcgctgtgcgttcgcggggcccgtcccttcaaccactttaagcgcagcatgtatcgcgccggccgctttcactgggagcgctttccggacgcccggccgcggtacgagggcgagtgggagatgctacgccagagcatgatgaaacacggcctgcgcaacagccagtttgtcgcgctgatgcccaccgccgcctcggcgcagatctcggacgtcagcgagggctttgcccccctgttcaccaacctgtttagcaaggtgacccgggacggcgagacgctgcgccccaacacgctcctgctaaaggaactggaacgcacgtttagcgggaagcgcctcctggaggtgatggacagtctcgacgccaagcagtggtccgtggcgcaggcgctcccgtgcctggagcccacccaccccctccggcgattcaagaccgcgtttgactacgaccagaagttgctgatcgacctgtgtgcggaccgcgccccctacgtcgaccatagccaatccatgaccctgtatgtcacggagaaggcggacgggaccctcccagcctccaccctggtccgccttctggtccacgcatataagcgcggactaaaaacagggatgtactactgcaaggttcgcaaggcgaccaacagcggggtctttggcggcgacgacaacattgtctgcacgagctgcgcgctgtgaccgacaaaccccctccgcgccaggcccgccgccactgtcgtcgccgtcccacgcgctcccccgctgccatggattccgcggccccagccctctcccccgctctgacggcccatacgggccagagcgcgccggcggacctggcgatccagattccaaagtgccccgaccccgagaggtacttctacacctcccagtgtcccgacattaaccacctgcgctccctcagcatccttaaccgctggctggaaaccgagcttgttttcgtgggggacgaggaggacgtctccaagctttccgagggcgagctcagcttttaccgcttcctcttcgctttcctgtcggccgccgacgacctggttacggaaaacctgggcggcctctccggcctgtttgagcagaaggacattctccactactacgtggagcaggaatgcatcgaagtcgtacactcgcgcgtgtacaacatcatccagctggtgctttttcacaacaacgaccaggcgcgccgcgagtacgtggccggcaccatcaaccacccggccatccgcgccaaggtggactggttggaagcgcgggtgcgggaatgcgcctccgttccggaaaagttcattctcatgatcctcatcgagggcatcttttttgccgcctcgtttgccgccatcgcctaccttcgcaccaacaaccttctgcgggtcacctgccagtcaaacgacctcatcagccgggacgaggccgtgcacacgacggcctcgtgttacatctacaacaactacctcggcgggcacgccaagcccccgcccgaccgcgtgtacgggctgttccgccaggcggtcgagatcgagatcggatttatccgatcccaggcgccgacggacagccatatcctgagcccggcggcgctggcggccatcgaaaactacgtgcgattcagcgcggatcgcctgttgggccttatccacatgaagccactgttttccgccccaccccccgacgccagctttccgctgagcctcatgtccaccgacaaacacaccaattttttcgagtgtcgcagcacctcctacgccggggcggtcgtcaacgatctgtgagggtcgcggcgcgcttctacccgtgtttgcccataataaacctctgaaccaaactttgggtctcattgtgattcttgtcagggacgcgggggtgggagaggataaaaggcggcgcaaaaagcagtaaccaggtccggccagattctgagggcataggataccataattttattggtgggtcgtttgttcggggacaagcgcgctcgtctgacgtttgggctactcgtcccagaatttggccaggacgtccttgtagaacgcgggtgggggggcctgggtccgcagctgctccagaaacctgtcggcgatatcaggggccgtgatatgccgggtcacgatagatcgcgccaggttttcgtcgcggatgtcctggtagataggcaggcgtttcagaagagtccacggcccccgctccttggggccgataagcgatatgacgtacttaatgtagcggtgttccaccagctcggtgatggtcatgggatcggggagccagtccagggactctggggcgtcgtggatgacgtggcgtcgccggctggccacataactgcggtgctcttccagcagctgcgcgttcgggacctggacgagctcgggcggggtgagtatctccgaggaggacgacctggggccggggtggcccccggtaacgtcccggggatccagggggaggtcctcgtcgtcttcgtatccgccggcgatctgttgggttagaatttcggtccacgagacgcgcgtctcggtgccgccggtggccggcggcagagggggcctggtttccgtggagcgcgagctggtgtgttcccggcggatggcccgccgggtctgagagcgactcgggggggtccagtgacattcgcgcagcacatcctccacggaggcgtaggtgttattgggatggaggtcggtgtggcagcggacaaagagggccaggaactgggggtagctcatcttaaagtacttcagtatatcgcgacagttgatcgtgggaatgtagcaggcgctaatatccaacacaatatcgcagcccatcaacaggaggtcagtgtccgtggtgtacacgtacgcgaccgtgttggtgtgatagaggttggcgcaggcatcgtccgcctccagctgacccgagttaatgtaggcgtaccccagggcccggagaacgcgaatacagaacagatgcgccagacgcagggccggcttcgagggcgcggcggacggcagcgcggctccggacccggccgtcccccgggtccccgaggccagagaggtgccgcgtcggcgcatgttggaaaaggcagagctgggtctggagtcggtgatgggggaaggcggtggagaggcgtccacgtcactggcctcctcgtccgtccggcactgggccgtcgtgcgggccaggatggccttggctccaaacacaaccggctccatacaattgaccccgcgatcggtaacgaagatggggaaaagggacttttgggtaaacacctttaataagcgacagaggcagtgtagcgtaatggcctcgcggtcgtaactggggtatcggcgctgatatttgaccaccaacgtgtacatgacgttccacaggtccacggcaatgggggtgaagtacccggccggggccccaaggccccggcgcttgaccagatggtgtgtgtgggcaaacttcatcatcccgaacaaacccatgtcaggtcgattgtaactgcggatcggcctaactaaggcgtggttggtgcgacggtccgggacacccgagcctgtctctctgtgtatggtgacccagacaacaacaccgacacaagaggacaataatccgttaggggacgctctttataatttcgatggcccaactccacgcggattggtgcagcaccctgcatgcgccggtgcgggccaaccttccccccgctcattgcctcttccaaaagggtgtggcctaacgagctgggggcgtatttaatcaggctagcgcggcgggcctgccgtagtttctggctcggtgagcgacggtccggttgcttgggtcccctggctgccatcaaaaccccaccctcgcagcggcatacgccccctccgcgtcccgcacccgagaccccggcccggctgccctcaccaccgaagcccacctcgtcactgtggggtgttcccagcccgcgttgggatgacggattcccctggcggtgtggcccccgcctcccacgtggaggacgcgtcggacgcgtccctcgggcagccggaggagggggcgccctgccaggtggtcctgcagggcgccgagcttaatggaatcctacaggcgtttgccccgctgcgcacgagccttctggactcgcttctggttatgggagaccggggcatccttatccataacacgatctttggggagcaggtgttcctgcccctggaacactcgcaattcagtcggtatcgctggcgcggacccacggcggcgttcctgtctctcgtggaccagaagcgctccctcctgagcgtgtttcgcgccaaccagtacccggacctacgtcgggtggagttggcgatcacgggccaggccccgtttcgcacgctggttcagcgcatatggacgacgacgtccgacggcgaggccgttgagctagccagcgagacgctgatgaagcgcgaactgacgagctttgtggtgctggttccccagggaacccccgacgttcagttgcgcctgacgaggccgcagctcaccaaggtccttaacgcgaccggggccgatagtgccacgcccaccacgttcgagctcggggttaacggcaaattttccgtgttcaccacgagtacctgcgtcacatttgctgcccgcgaggagggcgtgtcgtccagcaccagcacccaggtccagatcctgtccaacgcgctcaccaaggcgggccaggcggccgccaacgccaagacggtgtacggggaaaatacccatcgtaccttctctgtggtcgtcgacgattgcagcatgcgggcggtgctccggcgactgcaggtcgccgggggcaccctcaagttcttcctcacgacccccgtccccagtctgtgcgtcaccgccaccggtcccaacgcggtatcggcggtatttctcctgaaaccccagaagatttgcctggactggctgggtcatagccaggggtctccttccgccgggagctcggcctcccgggcctctgggagcgagccaacagacagccaggactccgcgtcggacgcggtcagccacggcgatccggaagacctcgatggcgctgcccgggcgggagaggcgggggcctcgtacgcctgtccgatgccgtcgtcgaccacgcgggtcactcccacgaccaagcgggggcgctcggggggcgaggatgcgcacgcggacacggccctaaagaaacctaagacggggtcgcccaccgcacccccgcccgcagatccagtccccctggacacggaggacgactccgatgcggcggacgggacggcggcccgtcccgccgctccagacgcccgaagcggaagccgttacgcgtgttactttcgcgacctcccgaccggagaagcaagccccggcgccttctccgccttccgggggggcccccaaaccccgtctggttttggattcccctgacggggcggggccttagcggccgcccaaccctcgcaacatcccggggttaatgtaaataaacttggtattgcccaacactctcccgcgtgtcgcgtgtggttcatgtgtgtgcctggcgcccccaccctcgggttcgtgtatttcctttccctgtccttataaaagccgtatgtggggcgctgacggaaccaccccgcgtgccatcacggccaaggcgcgggatgctccgcaacgacagccaccgggccgcgtccccggaggacggccagggacgggtcgacgacggacggccacacctcgcgtgcgtgggggccctggcgcgggggttcatgcatatctggcttcaggccgccacgctgggttttgcgggatcggtcgttatgtcgcgcgggccgtacgcgaatgccgcgtctggggcgttcgccgtcgggtgcgccgtgctgggctttatgcgcgcgccccctcccctcgcgcggcccaccgcgcggatatacgcctggctcaaactggcggccggtggagcggcccttgttctgtggagtctcggggagcccggcacgcagccgggggccctggccccgggcccggccacccagtgcctggcgctgggcgccgcctatgcggcgctcctggtgctcgccgatgacgtctatccgctctttctcctcgccccggggcccctgttcgtcggcaccctggggatggtcgtcggcgggctgacgatcggaggcagcgcgcgctactggtggatcggtgggcccgccgcggccgccctggccgcggcggtgttggcgggcccgggggcgaccaccgccagggactgcttctccagggcgtgccccgaccaccgccgcgtctgcgtcatcgtcgcaggcgagtctgtttcccgccgccccccggaggacccagagcgacccggggacccagggccaccgtcccccccgacaccccaacgatcccaggggccgccggccgatgaggtcgcaccggccggggtagcgcggcccgaaaacgtctgggtgcccgtggtcacctttctgggggctggcgcgctcgccgtcaagacggtgcgagaacatgcccggggaacgccgggcccgggcctgccgctgtggccccaggtgtttctcggaggccatgtggcggtggccctgacggagctgtgtcaggcgcttgcgccctgggaccttacggacccgctgctgtttgttcacgccggactgcaggtcatcaacctcgggttggtgtttcggttttccgaggttgtcgtgtatgcggcgctagggggtgccgtgtggatttcgttggcgcaggtgctggggctccggcgtcgcctgcacaggaaggaccccggggacggggcccggttggcggcgacgcttcggggcctcttcttctccgtgtacgcgctggggtttggggtgggggcgctgctgtgccctccggggtcaacgggcgggcggtcgggcgattgatatatttttcaataaaaggcattagtcccgaagaccgccggtgtgtgatgatttcgccataacacccaaaccccggatggggcccgggtataaattccggaaggggacacgggctaccttcactaccgagggcgcttggtcgggaggccgcatcgaacgcacacccccatccggtggtccgtgtggaggtcgtttttcagtgcccggtctcgctttgccgggaacgctagccgatccctcgcgagggggaggcgtcgggcggccagatatacgcgttgacattgattattgactagttattaatagtaatcaattacggggtcattagttcatagcccatatatggagttccgcgttacataacttacggtaaatggcccgcctggctgaccgcccaacgacccccgcccattgacgtcaataatgacgtatgttcccatagtaacgccaatagggactttccattgacgtcaatgggtggagtatttacggtaaactgcccacttggcagtacatcaagtgtatcatatgccaagtacgccccctattgacgtcaatgacggtaaatggcccgcctggcattatgcccagtacatgaccttatgggactttcctacttggcagtacatctacgtattagtcatcgctattaccatggtgatgcggttttggcagtacatcaatgggcgtggatagcggtttgactcacggggatttccaagtctccaccccattgacgtcaatgggagtttgttttggcaccaaaatcaacgggactttccaaaatgtcgtaacaactccgccccattgacgcaaatgggcggtaggcgtgtacggtgggaggtctatataagcagagctcgtttagtgaaccgtcagatcgcctggagacgccatccacgctgttttgacctccatagaagacaccgggaccgatccagcctccggactctagaggatcgaacccttgccaccatggagggagccgaagccggggcacgagccacctttggcccttgggattacggggtgtttgccaccatgttgctcgtcagtaccggaatcggtttgtgggtgggactcgctcggggcggtcagaggtccgcagatgatttctttacaggaggaaggcagctcgccgcagtgccagtagggttgtctctcgctgctagttttatgtctgcagtccaagtcctgggtgtaccagccgaagctgcccgatacggccttaaattcctttggatgtgcgtagggcaactcttgaatagtttgcttactgccctgctttttttgccaatcttttacagacttggtctgacaagtacctaccaatatttggagctgagattttctcgggcagtaaggctttgcgggactcttcagtatttggtggccactatgctctacacaggcatcgtcatctatgctcccgcattgattcttaatcaggtgaccggccttgacatctgggccagccttctctccactgggatcatttgcacactttatactacagttggcggtatgaaagctgtggtgtggactgacgtttttcaagtggtagttatgcttgtgggtttctgggtaatacttgctaggggggtaatgctgatgggagggccatggaacgtcctgagcctggcccaaaaccactcaagaattaacctgatggattttgatcccgacccaaggagccgatatacattttggaccttcgtggtcggcggttccttggtatggctttcaatgtatggggtaaaccaagctcaagtccaacgctatgtcgcttgccataccgagaggaaagctaaacttgcacttcttgtgaaccaacttggtctctttctcatagtggcaagcgctgcatgttgcggaattgttatgtttgtttattacaaagattgtgaccccttgcttactggccggatagccgcccccgatcagtatatgccccttctcgtgcttgatatattcgaggacctccccggtgttcccggactcttcctcgcatgtgcttactcaggcaccctttctaccgcctcaacctctatcaatgcaatggctgcagtcaccgtggaggacctcattaaacctcgaatgccatccctggccccaaggaaactcgtgtttatatccaagggcttgtccttcatatatggaagcacctgtctgacagtagcagcattgtcttctttgttgggcggcggggtactgcaggggtcttttacagtgatgggtgtaatctcaggcccccttttgggggcttttactctggggatgctcttgcccgcttgcaacacacctggcgtactctcaggactgactgccgggttggctgtttcactttgggttgcagtaggcgccacactgtatccacccggcgagcaaaccatgggtgttctcccaacctcagcagcaggatgcacaaacgcctccgttctgccttctccccctggggccgcaaatacatcaaggggaatccctagtagcggcatggatagtggaagacccgcctttgccgacacattctacgcagttagctacctgtattacggcgccttggggactctcaccactatgctctgcggggctctgattagttatttgaccggtcccaccaaacgatccagcctcggtcccggacttctgtggtgggacttggcaagacaaactgcttctgttgctcccaaagaagacacaactaccttggaagattcacttgtcaaaggaccagaggacatcccagcagccactaaaaagccaccaggtttcaggcccgaagcagagacacaccctctgtaccttggccacgacgtagaaaccaacctgtgaaagggttcgatccctaccggttagtaatgagtttaaacgggggaggctaactgaaacacggaaggagacaataccggaaggaacccgcgctatgacggcaataaaaagacagaataaaacgcacgggtgttgggtcgtttgttcataaacgcggggttcggtcccagggctggcactctgtcgataccccaccgagaccccattggggccaatacgcccgcgtttcttccttttccccaccccaccccccaagttcgggtgaaggcccagggctcgcagccaacgtcggggcggcaggccctgccatagcagatctgcgcagctgcgcgagacccccccgttacctttttaatatctatatagtttggtccccctctatcccgcccaccgctgggcgctataaagccgccaccctctcttccctcaggtcatccttggtcgatcccgaacgacacacggcgtggagcaaaacgcctccccctgagccgctttcctaccagcgcaacggcatgcctctgcgggcatcggaacacgcctaccggcccctgggccccgggacaccccccatgcgggctcggctccccgccgcggcctgggttggcgtcgggaccatcatcgggggagttgtgatcattgccgcgttggtcctcgtgccctcgcgggcctcgtgggcactttccccatgcgacagcggatggcacgagttcaacctcgggtgcatatcctgggatccgacccccatggagcacgagcaggcggtcggcggctgtagcgccccggcgaccctgatcccccgcgcggctgccaaacagctggccgccgtcgcacgcgtccagtcggcaagatcctcgggctactggtgggtgagcggagacggcattcgggcctgcctgcggctcgtcgacggcgtcggcggtattgaccagttttgcgaggagcccgcccttcgcatatgctactatccccgcagtcccgggggctttgttcagtttgtaacttcgacccgcaacgcgctggggctgccgtgaggcgcgtgtactgcggtctgtctcgtctcctcttctccccttccctccccctccgcatcccaggatcacaccggccaacgagggttggggggtccggcacggacccaaaataataaacacacaatcacgtgcgataaaaagaacacgcggtcccctgtggtgtttttggttatttttattaaatctcgtcgtcaaacagggggaaaggggcgtggtctagcgacggcagcacgggtggaggcgttcaccggctccggcgtccttcgcgtttaagcttggtcaggagggcgctcagggcggcgacgttggtcgggccgtcgttggtcagggcgttggctcgatggcgggcgaggacgggcgaggggctcaacggcgggggcgggggcccggtgcggcccgggggggaaaatagggcggatcccccccagtcgtacaggggattttccgcctcaatgtacggggaggccggcgctgcattcgccgtgttcgcgcagacgttttcgtagacccgcatccatggtatttcctcgtagacacgccccccgtcctcgctcacagtctcgtatattgactcgtcgtcctcgtagggggcgtgccgttcgcgggccgaggcggcgtgggtggctttgcggcgggcgtcgtcgtcgtcgtcggccgtcagatacgtggcttccatctggtcgggttctccctccggggcgggtccccacccccgtggccgatcgaggctccccagagacgcgcgccggacgaggagggggcacgtcgccgccggcggtcgcctgtcgggtcccgcgacgttacgggccgggaggcgcgggggcacctcccccatgtgcgtgtaatacgtggccggctgtgcggccgcagcggggggctcggcgaccgggtcgtccgcatccggaagcgggggcgccgcgccgtccgcgcggcgcctccggaaccgccgggtggccgcgggggtcgagtgtaggcgaggtcgggggaggggcgggggctcgttgtcgcgccgcgcccgctgaatcttttcccgacaggtcccaccccccgcgcgatgcccccccgggccgcgggccatgtcgtccgggggaggccccgcggaccacgtcgtccggcgagacgccacgagccgcaggatggactcgtagtggagcgacggcgccccgctgcggagcagatccgcggccagggcggccccgaaccaagccttgatgctcaactccatccgggcccagctgggggcggtcatcgtggggaacaggggggcggtggtccgacagaaacgctcctggctgtccaccgcggcccgcagatactcgttgttcaggctgtcggtggcccagacgccgtacccggtgagggtcgcgttgatgatatactgggcgtggtgatggacgatcgacagaacctccaccgtggatacgacggtatccacggtcccgtacgtaccgccgctccgcttgccggtctgccacaggttggctaggcgcgtcaggtggcccaggacgtcgctgaccgccgccctgagcgccatgcactgcatggagccggtcgtgccgctgggaccccggtccagatggcgcgcgaacgtttccgcgggcgcctccgggctgccgccgagcgggaggaaccggcgattggagggactcagccggtggcatacgtgcttgtctgtcgtccacagcatccaggacgcccaccggtacagcacggagacgtaggccaggagctcgttgagccgcagtgcggtgtcggtgctggggcggcttgggtccgccgggcgcataaagaacatgtactgctgaatccgatggagggcgtcgcgcaggccggccacggtggcggcgtacttggccgccgcggccccgctcttgaacggggtgcgcgccagcagctttggcgccagggtgggccgcagcagcacgtgaaggctggggtcgcagtcgcccacggggtcctcggggacgtccaggccgctgggcaccaccgtctgcaggtacttccagtactgcgtgaggatggcgcggctcaactggccgccggtgagctccacctcgcccagcgcctgggtggcggccgaagcgtagtgccggatgtactcgtagtgcgggtcgctggcgagcccgtccacgatcaaactctcgggaaccgtgttgtgttgccgcgcggccaaccggacgctgcgatcggtgcaggtcagaaacgccggctgcgcgtcgtcggagcgctgccgcaaggcgcccacggccgcgctaaggagcccctccggggtggggagcagacacccgccgaagatgcgccgctcgggaacgcccgcgttgtcgccgcggatcaggttggcaggcgtcaggcaccgcgccagccgcagggagctcgcgccgcgcgtccggcgctgcatggtgacgcccgttcggtcgggacccgccggtcggagttatgccgcgtccagggccatcggggcgctttttatcgggaggagcttatgggcgtggcgggcctcccagcccggtcgcgcgcctccccgacacgtgcgcccgcagggcggcggccccctcgtctcccatcagcagtttcctaaactgggacatgatgtccaccacgcggacccgcgggcccaacacggacccgccgcttacgggggcgggggggaagggctccaggtccttgagaagaaaggcggggtctgccgtcccggacacgggggcccggggcgctgaggaggcggggcgcagatccacgtgctccgcggccgcgcggacgtccgcccagaacttggcgggggtggtgcgcgcgtacaggggctgggtcgctcggaggacgcacgcgtagcgcaggggggtgtacgtgcccacctcgggggccgtgaatcccccgtcaaacgcggccagtgtcacgcacgccaccacggtgtcggcaaagcccagcagccgctgcaggacgagcccggcggccagaatggcgcgcgtggccgccgcgtcgtcccggcgccggtgcgcgtccccgcacgcccgggcgtactttaaggtcacggtcgccagggccgtgtgcagcgcgtacaccgcagcgcccagcacggcgttgagcccgctgttggcgagcagccggcgcgctgcggtgtcgcccagcgcctcgtgctcggcccccacgaccgcggggcttcccaggggcagggcgcgaaacagctcctcccgcgccacgtccgcaaaggcggggtggtgcacgtgcgggtgcaggcgcgcccccacgaccaccgagagccactggaccgtctgctccgccatcaccgccagcacatccagcacgcgccccaggaaggcggcctcccgcgtcaaaacgcaccggacggcgtcgggattgaagcgggcgagcagggccccggtggccaggtacgtcatgcggccggcatagcgggcggccacgcgacagtcgcggtccagcagcgcgcgcaccccgggccagtacagcagggaccccagcgagctgcgaaacaccgcggcgtcggggccggattggggggacactaacccccccgcgctcagtaacggcacggccgcggccccgacgggacgcaacgccgtgaggctcgcgaactgccgcctcagctcggcagccctgtcgtccaggtccgacccgcgcgcctctgcgtgaaggcgcgtcccgcacacccacccgttgatggccagccgcacgacggcatccgccaaaaagctcatcgcctgggcggggctggtttttgttcgacgatccgtcaggtcaagaatcccatcgcccgtgatataccaggccaacgcctcgccctgctgcagggtttggcggaaaaacaccgcggggttgtcgggggaggcgaagtgcatgacccccacgcgcgataacccgaacgcgctatccggacacgggtaaaacccggccggatgccccagggctagggcggagcgcacggactcgtcccacacggcaacctgaggggccagtcgatccaacgggaatgccgcccggagctccgggcccggcacgcgtccctccagaacctccaccttgggcggggaacgggccccgccgccgtcctccggcccgacgtcttccgggtagtcgtcctcctcgtactgcagctcctctaggaacagcggcgacggcgccacccgcgaaccgccgacccgccccaaaatagcccgcgcgtcgacgggacccaggtatcccccctgccgggcctgcggaggaccgcggggaacctcatcatcatcgtccaggcgaccgcgcaccgactggctacgggccgcatcgggcccggggcgctgccgggacgctcggcgatgggatgtgggcggggcttccgacgcgcgccgtcgtcgggctcgcgggccttcccgtcgacggcgcacgggcggctcgtcgcccgccatctcctccagagcctctagctcgctgtcgtcatccccgcggaacaccgcacgcaggtaccccatgaaccccaccccatcgcccgctggctcgtccgccacgggcgaggcgcgggggcgggtggatgcgcgcctcctacgccccgcgggttcgcgagccgacatggtggcgatagacgcgggttatcggatgtccgctaccccccaaaaaagaaaaagaccccacagcgcggatggaggccggggtaggtgccgccggaccccctcgcgatgggaatggacgggagcgacggggccggcgcaaaaaacgcagtatctcccgcgaaggctacccgccgccccagcccccggccaaatgcggaaacggtcccgcgctctcgcctttatacgcgggccgccctgcgacacaatcacccgtccgtggtttcgaatctacacgacaggcccgcagacgcggctaacacacacgccggcaacccagaccccagtgggttggttgcgcggtcccgtctcctggctagttcttttccccaccaccaaataatcagacgacaaccgcaggtttttgtaatgtatgtgctcgtgtttattgtggatacgaaccggggacgggaggggaaaacccagacgggggatgcgggtccggtcgcgccccctacccaccgtactcgtcaattccaagggcatcggtaaacatctgctcaaactcgaagtcggccatatccagagcgccgtagggggcggagtcgtggggggtaaatcccggacccggggaatccccgtcccccaacatgtccagatcgaaatcgtctagcgcgtcggcatgcgccatcgccacgtcctcgccgtctaagtggagctcgtcccccaggctgacatcggtcgggggggccgtcgacagtctgcgcgtgtgtcccgcggggagaaaggacaggcgcggagccgccagccccgcctcttcgggggcgtcgtcgtccgggagatcgagcaggccctcgatggtagacccgtaattgtttttcgtacgcgcgcggctgtacgcgtgttcccgcatgaccgcctcggagggcgaggtcgtgaagctggaatacgagtccaacttcgcccgaatcaacaccataaatgcgggcctggttgccatgcagggtgggaggggtcgtcaacggcgcccctggctcctccgtagccgcgctgcgcaccagcgggaggttaaggtgctcgcgaatgtggtttagctcccgcagccggcgggcctcgattggcactccccggacggtgagcgctccgttgacgaacatgaagggctggaacagacccgccaactgacgccagctctccaggtcgcaacagaggcagtcaaacaggtcgggccgcatcatctgctcggcgtacgcggcccataggatctcgcgggtcaaaaatagatacaaatgcaaaaacagaacacgcgccagacgagcggtctctcggtagtacctgtccgcgatcgtggcgcgcagcatttctcccaggtcgcgatcgcgtccgcgcatgtgcgcctggcggtgcagctgccggacgctggcgcgcaggtaccggtacagggccgagcagaagttggccaacacggttcgatagctctcctcccgcgcccgtagctcggcgtggaagaaacgagagagcgcttcgtagtagagcccgaggccgtcgcgggtggccggaagcgtcgggaaggccacgtcgccgtgggcgcgaatgtcgatttgggcgcgttcggggacgtacgcgtccccccattccaccacatcgctgggcagcgttgataggaatttacactcccggtacaggtcggcgttggtcggtaacgccgaaaacaaatcctcgttccaggtatcgagcatggtacatagcgcggggcccgcgctaaagcccaagtcgtcgaggagacggttaaagagggcggcgggggggacgggcatgggcggggagggcatgagctgggcctggctcaggcgccccgttgcgtacagcggaggggccgccggggtgtttttgggacccccggccgggcgggggggtggtggcgaagcgccgtccgcgtccatgtcggcaaacagctcgtcgaccaagaggtccattgggtggggttgatacgggaaagacgatatcgggcttttgatgcgatcgtccccgcccgcccagagagtgtgggacgcccgacggcgcgggaagagaaaaacccccaaacgcgttagaggaccggacggaccttatggggggaagtgggcagcgggaaccccgtccgttcccgaggaatgacagcccgtggtcgccaccccgcatttaagcaacccgcacgggccgccccgtacctcgtgacttccccccacattggctcctgtcacgtgaaggcgaaccgagggcggctgtccaacccaccccccgccacccagtcacggtccccgtcggattgggaaacaaaggcacgcaacgccaacaccgaatgaacccctgttggtgctttattgtctgggtacggaagtttttcactcgacgggccgtctggggcgagaagcggagcgggctggggctcgaggtcgctcggtggggcgcgacgccgcagaacgccctcgagtcgccgtggccgcgtcgacgtcctgcaccacgtctggattcaccaactcgttggcgcgctgaagcaggtttttgccctcgcagaccgtcacgcggatggtggtgatgccaaggagttcgttgaggtcttcgtctgtgcgcggacgcgacatgtcccagagctggaccgccgccatccgggcatgcatggccgccaggcgcccgaccgcggcgcagaagacgcgcttgttaaagccggccacccggggggtccatggcgcgtcggggtttgggggggcggtgctaaagtgcagctttctggccagcccctgcgcgggtgtcttggatcgggttggcgccgtcgacgcgggggcgtctgggagtgcggcggattctggctgggccgatttcctgccgcgggtggtctccgccgccggggccgcgggggccttagtcgccacccgctgggttcggggggcccggggggcggtggtgggtgtgcgtccggcccctccggacccagcgggcggcggaggcgcccgcgcaggccccgggccggacaaaaccgccccggaaacgggacgccgcgtccgggggacctccgggtgttcgtcgtcttcggatgacgagcccccgtagagggcataatccgactcgtcgtactggacgaaacggacctcgcccctcgggcgcgcgcgtgtctgtagggcgccacggcgggaggtggcaggcggactatcgggactcgccatacatgaagacggggtgtagtacagatcctcgtactcatcgcgcggaacctcccgcggacccgacttcacggagcggcgagaggtcatggttccacgaacacgctagggtcggatgcgcggacaattaggcctgggttcggacggcggggggtggtgcaggtgtggagaggtcgagcgataggggcggcccgggagagaagagagggtccgcaaaacccactggggatgcgtgagtggccctctgtgggcggtgggggagagtcttataggaagtgcatataaccacaacccatgggtctaaccaatccccaggggccaagaaacagacacgccccaaacggtctcggtttccgcgaagaaggggaagtcctgggacaccctccacccccacccctcaccccacacagggcgggttcaggcgtgcccggcagccagtagcctctggcagatctgacagacgtgtgcgataatacacacgcccatcgaggccatgcctacataaaagggcaccagggcccccggggcagacatttggccagcgttttgggtctcgcaccgcgcgcccccgatcccatcgcgcccgccctcctcgccgggcggctccccgtgcgggcccgcgtctcccgccgctaaggcgacgagcaagacaaacaacaggcccgcccgacagacccttctgggggggcccatcgtccctaacaggaagatgagtcagtggggatccggggcgatccttgtccagccggacagcttgggtcgggggtacgatggcgactggcacacggccgtcgctactcgcgggggcggagtcgtgcaactgaacctggtcaacaggcgcgcggtggcttttatgccgaaggtcagcggggactccggatgggccgtcgggcgcgtctctctggacctgcgaatggctatgccggctgacttttgtgcgattattcacgcccccgcgctatccagcccagggcaccacgtaatactgggtcttatcgactcggggtaccgcggaaccgttatggccgtggtcgtagcgcctaaaaggacgcgggaatttgcccccgggaccctgcgggtcgacgtgacgttcctggacatcctggcgacccccccggccctcaccaagccgatttccctgcggcagttcccgcaactggcgcccccccctccaaccggggccgggatacgcgcagatccttggttggagggggcgctcggggacccaagcgtgactccggccctaccggcgcgacgccgagggcggtccctcgtctatgccggcgagctgacgccggttcagacggaacacggggacggcgtacgagaagccatcgccttccttccaaaacgcgaggaggatgccggtttcgacattgtcgtccgtcgcccggtcaccgtcccggcaaacggcaccacggtcgtgcagccatccctccgcatgctccacgcggacgccgggcccgcggcctgttatgtgttggggcggtcgtcgctcaacgcccgcggcctcctggtcgttcctacgcgctggctccccgggcacgtatgtgcgtttgttgtttacaaccttacgggggttcctgtgaccctcgaggccggcgccaaggtcgcccagctcctggttgcgggggcggacgctcttccttggatccccccggacaactttcacgggaccaaagcgcttcgaaactaccccaggggtgttccggactcaaccgccgaacccaggaacccgccgctcttggtgtttacgaacgagtttgacgcggaggcccccccgagcgagcgcgggaccgggggttttggctctaccggtatttagcccatagcttggggttcgttccgggcaataaaaaacgtttgtatctcatctttcctgtgtgtagttgtttctgttggaggcctgtgggtctatcacacccgcccctccatcccacaaacacagaacacacgggttggatgaaaacacgcatttattgacccaaaacacacggagctgctcgagatgggccagggcgaggtgcggttggggaggctgtaggtctgggaacggacacgcggggacacgattccggtttggggtccgggagggcgtcgccgtttcgggcggcaggcgccagcgtaacctccgggggcggcgtgtgggggtgccccaaggagggcgcctcggtcaccccaagcccccccaagcgggttcccccggcaaccccgaaggcggagaggccaagggcccgttcggcgatggccacatcctccatgaccacgtcgctctcggccatgctccgaatagcctgggagacgagcacatccgcggacttgtcagccgcccccacggacatgtacatctgcaggatggtggccatacacgtgtccgccaggcgccgcatcttgtcctgatgggccgccacggccccgtcgatcgtgggggcctcgagcccggggtggtggcgcgccagtcgttctaggttcaccatgcaggcgtggtacgtgcgggccaaggcgcgggccttcacgaggcgtcgggtgtcgtccagggaccccagggcgtcatcgagcgtgatgggggcgggaagtagcgcgttaacgaccaccagggcctcctgcagccgcggctccgcctccgagggcggaacggccgcgcggatcatctcatattgttcctcggggcgcgctccccagccacatatagccccgagaagagaagccatcgcgggcgggtactggcccttgggcgcgcggacgcaatggggcaggaagacgggaaccgcggggagaggcgggcggccgggactcccgtggaggtgaccgcgctttatgctaccgacgggtgcgttattacctcttcgatcgccctcctcacaaactctctactgggggccgagccggtttatatattcagctacgacgcatacacgcacgatggccgtgccgacgggcccacggagcaagacaggttcgaagagagtcgggcgctctaccaagcgtcgggcgggctaaatggcgactccttccgagtaaccttttgtttattggggacggaagtgggtgggacccaccaggcccgcgggcgaacccgacccatgttcgtctgtcgcttcgagcgagcggacgacgtcgccgcgctacaggacgccctggcgcacgggaccccgctacaaccggaccacatcgccgccaccctggacgcggaggccacgttcgcgctgcatgcgaacatgatcctggctctcaccgtggccatcaacaacgccagcccccgcaccggacgcgacgccgccgcggcgcagtatgatcagggcgcgtccctacgctcgctcgtggggcgcacgtccctgggacaacgcggccttaccacgctatacgtccaccacgaggcgcgcgtgctggccgcgtaccgcagggcgtattatggaagcgcgcagagtcccttctggtttcttagcaaattcgggccggacgaaaaaagcctggtgctcaccactcggtactacctgcttcaggcccagcgtctggggggcgcgggggccacgtacgacctgcaggccatcaaggacatctgcgccacctacgcgattccccacgccccccgccccgacaccgtcagcgccgcgtccctgacctcgtttgccgccatcacgcggttctgttgcacgagccagtacgcccgcggggccgcggcggccgggtttccgctttacgtggagcgccgtattgcggccgacgtccgcgagaccagtgcgctggagaagttcataacccacgatcgcagttgcctgcgcgtgtccgaccgtgaattcattacgtacatttacctggcccattttgagtgtttcagccccccgcgcctagccacgcatcttcgggccgtgacgacccacgaccccaaccccgcggccaacacggagcagccctcgcccctgggcagggaggccgtggaacaatttttttgccacgtgcgcgcccaactgaatatcggggagtacgtcaaacacaacgtgaccccccgggagaccgtcctggatggcgatacggccaaggcctacctgcgcgctcgcacgtacgcgcccggggccctgacgcccgcccccgcgtattgcggggccgtggactccgccaccaaaatgatggggcgtttggcggacgccgaaaagctcctggtcccccgcgggtggcccgcgtttgcgcccgccagtcccggggaggatacggcgggcggcacgccgcccccacagacctgcggaatcgtcaagcgcctcctgagactggccgccacggaacaacaggacaccacgcccccggcgatcgcggcgcttatccgtaatgcggcggtgcagactcccctgcccgtctaccggatatccatggtccccacgggacaggcatttgccgcgctggcctgggacgactgggcccgcataacgcgggacgctcgcctggccgaagcggtcgtgtccgccgaagcggcggcgcaccccgaccacggcgcgctgggcaggcggctcacggatcgcatccgcgcccagggccccgtgatgccccctggcggcctggatgccggggggcagatgtacgtgaatcgcaacgagatattcaacggcgcgctggcaatcacaaacatcatcctggatctcgacatcgccctgaaggagcccgtcccctttcgccggctccacgaggccctgggccactttaggcgcggggctctggctgcggttcagctcctgtttcccgcggcccgcgtggaccccgacgcatatccctgttattttttcaaaagcgcatgtcggcccggcccggcgtccgtgggttccggcagcggactcggcgacgacggggactggtttccctgctacgacgacgccggtgatgaggagtgggcggaggacccgggcgccatggacacatcccacgatcccccggacgacgaggttgcctactttgacctgtgccacgaagtcggccccacggcggaacctcgcgaaacggattcgcccgtgtgttcctgcaccgacaagatcggactgcgggtgtgcatgcccgtccccgccccgtacgtcgtccacggttctctaacgatgcggggggtggcacgggtcatccagcaggcggtgctgttggaccgagattttgtggaggccatcgggagctacgtaaaaaacttcctgttgatcgatacgggggtgtacgcccacggccacagcctgcgcttgccgtattttgccaaaatcgcccccgacgggcctgcgtgcggaaggctgctgccagtgtttgtgatcccccccgcctgcaaagacgttccggcgtttgtcgccgcgcacgccgacccgcggcgcttccattttcacgccccgcccacctatctcgcttccccccgggagatccgtgtcctgcacagcctgggtggggactatgtgagcttctttgaaaggaaggcgtcccgcaacgcgctggaacactttgggcgacgcgagaccctgacggaggtcctgggtcggtacaacgtacagccggatgcgggggggaccgtcgaggggttcgcatcggaactgctggggcggatagtcgcgtgcatcgaaacccactttcccgaacacgccggcgaatatcaggccgtatccgtccggcgggccgtcagtaaggacgactgggtcctcctacagctagtccccgttcgcggtaccctgcagcaaagcctgtcgtgtctgcgctttaagcacggccgggcgagtcgcgccacggcgcggacattcgtcgcgctgagcgtcggggccaacaaccgcctgtgcgtgtccttgtgtcagcagtgctttgccgccaaatgcgacagcaaccgcctgcacacgctgtttaccattgacgccggtacgccatgctcgccgtccgttccctgcagcacctctcaaccgtcgtcttgataacggcgtacggcctcgtgctcgtgtggtacaccgtcttcggtcacccccccaacgggggctggcgcaaccacgcccatatctgctacgccaatcttatcgcgggtagggtcgtgcccttccaggtcccacccgacgccatgaatcgtcggatcatgaacgtccacgaggcagttaactgtctggagaccctatggtacacacgggtgcgtctggtggtcgtagggtggttcctgtatctggcgttcgtcgccctccaccaacgccgatgtatgtttggtgtcgtgagtcccgcccacaagatggtggccccggccacctacctcttgaactacgcaggccgcatcgtatcgagcgtgttcctgcagtacccctacacgaaaattacccgcctgctctgcgagctgtcggtccagcggcaaaacctggttcagttgtttgagacggacccggtcaccttcttgtaccaccgccccgccatcggggtcatcgtaggctgcgagttgatgctacgctttgtggccgtgggtctcatcgtcggcaccgctttcatatcccggggggcatgtgcaatcacataccccctgtttctgaccatcaccacctggtgttttgtctccaccatcggcctgacagagctgtattgtattctgcggcggggcccggcccccaagaacgcagacaaggccgccgccccggggcgatccaaggggctgtcgggcgtctgcgggcgctgctgttccatcatcctctcgggcatcgcagtgcgattgtgttatatcgccgtggtggccggggtggtgctcgtggcgcttcactacgagcaggagatccagaggcgcctgtttgatgtatgacgtcacatccaggccggcggaaaccggaacggcatatgcaaattggaaactgtcctgtcttggggcccacccacccgacgcgtcatatgcaaatgaaaatcggtcccccgaggccacgtgtagcctggatcccaacgaccccgcccatgggtcccaattggccgtcccgttaccaagaccaacccagccagcatatccacccccgcccgggtccccgcggaagcggaacggtgtatgtgatatgctaattaaatacatgccacgtacttatggtgtctgattggtccttgtctgtgccggaggtggggcgggggccccgcccggggggcggaacgaggaggggtttgggagagccggccccggcaccacgggtataaggacatccaccacccggccggtggtggtgtgcagccgtgttccaaccacggtcacgcttcggtgcctctccccgattcgggcccggtcgctcgctaccggtgcgccaccaccagaggccatatccgacaccccagccccgacggcagccgacagcccggtcatggcgactgacattgatatgctaattgacctcggcctggacctctccgacagcgatctggacgaggacccacccgagccggcggagagccgccgcgacgacctggaatcggacagcagcggggagtgttcctcgtcggacgaggacatggaagacccccacggagaggacggaccggagccgatactcgacgccgctcgcccggcggtccgcccgtctcgtccagaagaccccggcgtacccagcacccagacgcctcgtccgacggagcggcagggccccaacgatcctcaaccagcgccccacagtgtgtggtcgcgcctcggggcccggcgaccgtcttgctcccccgagcagcacgggggcaaggtggcccgcctccaacccccaccgaccaaagcccagcctgcccgcggcggacgccgcgggcgtcgcaggggtcggggtcgcggtggtcccggggccgccgatggtttgtcggacccccgccggcgtgcccccagaaccaatcgcaacccggggggaccccgccccggggcggggtggacggacggccccggcgccccccatggcgaggcgtggcgcggaagtgagcagcccgacccacccggaggcccgcggacacggggcgtgcgccaagcaccccccccgctaatgacgctggcgattgcccccccgcccgcggacccccgcgccccggccccggagcgaaaggcgcccgccgccgacaccatcgacgccaccacgcggttggtcctgcgctccatctccgagcgcgcggcggtcgaccgcatcagcgagagctttggccgcagcgcacaggtcatgcacgacccctttggggggcagccgtttcccgccgcgaatagcccctgggccccggtgttggcgggccaaggagggccctttgacgccgagaccagacgggtctcctgggaaaccttggtcgcccacggcccgagcctctatcgcacttttgccggcaatcctcgggccgcatcgaccgccaaggccatgcgcgactgcgtgctgcgccaagaaaatttcatcgaggcgctggcctccgccgacgagacgctggcgtggtgcaagatgtgcatccaccacaacctgccgctgcgcccccaggaccccattatcgggacggccgcggctgtgctggataacctcgccacgcgcctgcggccctttctccagtgctacctgaaggcgcgaggcctgtgcggcctggacgaactgtgttcgcggcggcgtctggcggacattaaggacattgcatccttcgtgtttgtcattctggccaggctcgccaaccgcgtcgagcgtggcgtcgcggagatcgactacgcgacccttggtgtcggggtcggagagaagatgcatttctacctccccggggcctgcatggcgggcctgatcgaaatcctagacacacaccgccaggagtgttcgagtcgtgtctgcgagttgacggccagtcacatcgtcgcccccccgtacgtgcacggcaaatatttttattgcaactccctgttttaggtacaataaaaacaaaacatttcaaacaaatcgccccacgtgttgtccttctttgctcatggccggcggggcgtgggtcacggcagatggcgggggtgggcccggcgtacggcctgggtgggcggagggaactaacccaacgtataaatccgtccccgctccaaggccggtgtcatagtgcccttaggagcttcccgcccgggcgcatccccccttttgcactatgacagcgacccccctcaccaacctgttcttacgggccccggacataacccacgtggcccccccttactgcctcaacgccacctggcaggccgaaacggccatacacaccagcaaaacggactccgcttgcgtggccgtgcggagttacctggtccgcgcctcctgtgagaccagcggcacaatccactgctttttctttgcggtatacaaggacacccaccacacccctccgctgattaccgagctccgcaactttgcggacctggttaaccacccgccggtcctacgcgaactggaggataagcgcggggtgcggctgcggtgtgcgcggccgtttagcgtcgggacgattaaggacgtctctgggtccggcgcgtcctcggcgggagagtacacgataaacgggatcgtgtaccactgccactgtcggtatccgttctcaaaaacatgctggatgggggcctccgcggccctacagcacctgcgctccatcagctccagcggcatggccgcccgcgcggcagagcatcgacgcgtcaagattaaaattaaggcgtgatctccaacccccccatgaatgtgtgtaaccccccaaaaaaataaacagccgtaacccaatcaaaccaggcgtggtgtgagtttgtggacccaaagccctcagagacaacgcgacaggccagtatggaccgtgatacttttatttattaactcacaggggcgcttaccgccacaggaataccagaataatgaccaccactatcgcgaccaccccaaatacagcatggcgccccaccacgccacaacagccctgtcgccggtatggggcatgatcagacgagccgcgagccgcgcgttgggccctgtacagctcgcgcgaattgaccctaggaggccgccacgcgcccgagttttgcgttcgtcgctggtcgtcgggcgccaaagccccggacggctgttcggtcgaacgaacggccacgacagtggcataggttggggggtggtccgacatagcctcggtgtacgtcgggaggcccgacaagaggtcccttgagatgtcgggtggggccacaagcctggtttccggaagaaacaggggggttgccaataacccgccagggccaaaactccggcgctgcgcacgtcgttcggcgcggcgccgggcgcgccgagcggctcgctgggcggcttggcgtgagcggccccgctccgacgcctcgccctctccggaggaggttggcggaattggcacggacgacaggggcccagcagagtacggtggaggtgggtccgtgggggtgtccagatcaataacgacaaacggcccctcgttcctaccagacaagctatcgtaggggggcgggggatcagcaaacgcgttccccgcgctccatagacccgcgtcgggttgcgccgcctccgaagccatggatgcgccccaaagccacgactcccgcgcgctaggtccttggggtaagggaaaaggccctactccccatccaagccagccaagttaacgggctacgccttcggggatgggactggcaccccggcggattttgttgggctggtacgcgttgcccaaccgagggccgcgtccacgggacgcgccttttataaccccgggggtcattcccaacgatcacatgcaatctaactggctcccctctccccccctctcccctctccccccctctcccctctccccccctctcccctctccccccctctcccctctccccccctctcccctctccccccctctcccctctccccccctctcccctctccccccctctcccctctccccccctctcccctctccccccctctcccctctccccccctgctctttccccgtgacacccgacgctggggggcgtggctgccgggaggggccgcggatgggcggggcctactcggtctcccgcccccgcccccgaaccgccccgccggccttgcccccctttgatcccctgctacccccaacccgtgctcgtggtgcgggttgggtggggggggggagtgtgggcgggggtgtgcgggaggtgtcggtggtggtggtggtggtaggaatggtggtgaggggggggggcgctggttggtcaaaaaagggagggacgggggccggcagaccgacggcgacaacgctccccggcggccgggtcgcggctcttacgagcggcccggcccgcgctcccaccccccgggccgtgtccttgctttccccccgtctccccccccctccttctcctcctcctcctcctcgtttttccaaaccccgcccacccggcccggcccggcccggccaccgccgcccacccacccacctcgggagacccagccccggtcccccgttccccgggggccgttatctccagcgccccgtccggcgcgccgccccccgccgctaaaccccatcccgcccccgggaccccacatataagcccccagccacacgcaagaacagacacgcagaacggctgtgtttatttaaataaaccgatgtcggaataaacaaacacaaacacccgcgacggggggacggagggaggggggtgacgggggacgggaacagccacaaaaaacacccacaaaaaaaaacagccacccccgacacccccccccacccccagtctcttcgccttttcccccccaccccacgcccccactgagcccggtcgatcgacgagcacccccgcccccgcccctgccccggcgacccccggcccgcacgatcccgacaacaataacaaccccaacggaaagcggcggggtgtgggggggggcgaggaacaaccgaggggaacgggggatggaaggacgggaagtggaagtcctgatacccatcctacacccccctgccttccaccctccggccccccgcgagtccacccgccggccggctaccgagaccgaacacggcggccgccgcagccgccgcagccgccgccgacaccgcagagccggcgcgcgcacacacaagcggcagaggcagaaaggcccagagtcattgtttatgtggccgcgggccagcagacggcccgcgacacccccccccccgcccgtgtgggtatccggccccccgccccgcgccggtccattaagggcgcgcgtgcccgcgagatatcaatccgttaagtgctctgcagacaggggcaccgcgcccggaaatccattaggccgcagacgaggaaaataaaattacatcacctacccacgtggtgctgtggcctgtttttgctgcgtcatctgagcctttataaaagcgggggcgcggccgtgccgatcgcgggtggtgcgaaagactttccgggcgcgtccgggtgccgcggctctccgggcccccctgcagccggggcggccaaggggcgtcggcgacatcctccccctaagcgccggccggccgctggtctgttttttgttttccccgtttcgggggtggggggggttgcggtttctgtttctttaacccgtctggggtgtttttcgttccgtcgccggaatgtttcgttcgtctgtcccctcacggggcgaaggccgcgtacggcccgggacgagggggcccccgaccgcggcggtccgggccccgtccgggcccgctcgccggcacgcgacgcgaaaaaggccccccggaggcttttccgggttcccggcccggggcctgagataaacaatcggggttaccgccaacggccggcccccgtggcggcccggcccggggccccggcggacccaaggggccccggcccggggccccacaacggcccggcgcatgcgctgtggtttttttttctcggtgttttgtcgggctccgtcgcctttcctgttctcgcttctccccccccccccttcttcacccccagtaccctcctccctcccttcctcccccgttatcccactcgtcaagggcgccccggtgtggttcaacaaagacgccgcgtttccaggtaggttagacacctgcttctccccaatagaggggggggacccaaacgacagggggcgccccagaggctaaggtcggccacgccactcgcgggtgggctcgtgttacagcacaccagcccgttcttttccccccctcccacccttagtcagactctgttacttacccgtccgaccaccaactgcccccttatctaagggccggctggaagaccgccagggggtcggccggtgtcgctgtaaccccccacgccaatgacccacgtactccaagaaggcatgtgtcccaccccgcctgtgtttttgtgcctggctctctatgcttgggtcttactgccgggggggggggagtgcgggggagggggggtgtggaaggaaatgcacggcgcgtgtgtaccccccctaaagttgttcctaaagcgaggatatggaggagtggcgggtgccgggggaccggggtgatctctggcacgcgggggtgggaagggtcgggggaggggggatggggtaccggcccacctggccgacgcgggtgcgcgtgcctctgcacaccaaccccacgtcccccggcggtctctaagaagcaccgccccccctccttcataccaccgagcatgcctgggtgtgggttggtaaccaacacgcccatcccctcgtctcctgtgattctctggctgcaccgcattcttgttttctaactatgttcctgtttctgtctccccccccacccctccgccccaccccccaacacccacgtctgtggtgtggccgacccccttttgggcgccccgtcccgccccgccacccctcccgtcctttgttgccctatagtgtagttaacccccccccgccctttgtggcggccagaggccaggtcagtccgggcgggcaggcgctcgcggaaacttaacacccacacccaacccactgtggttctggctccatgccagtggcaggatgctttcggggatcggtggtcaggcagcccgggccgcggctctgtggttaacaccagagcctgcccaacatggcacccccactcccacgcacccccactcccacgcacccccactcccacgcacccccactcccacgcacccccactcccacgcacccccactcccacgcacccccactcccacgcacccccactcccacgcacccccactcccacgcacccccgagatccatccaacacagacagggaaaagatacaaaagtaaacctttatttcccaatagacagcaaaaatcccctgagttttttattagggccaacactaaagacccgctggtgtgtggtgcccgtgtctttcacttttcccctccccgacacggattggctggtgtagtgggcgcggccagagaccacccagcgcccgacccccccctccccacaaacacggggggcgtcccttattgttttccctcgtcccgggtcgacgccccctgctccccggaccacgggtgccgagaccgcaggctgcggaagtccagggcgcccactagggtgccctggtcgaacagcatgttccccacgggggtcatccagaggctgttccactccgacgcgggggccgtcgggtactcggggggcatcacgtggttacccgcggtctcggggagcagggtgcggcggctccagccggggaccgcggcccgcagccgggtcgccatgtttcccgtctggtccaccaggaccacgtacgccccgatgttccccgtctccatgtccaggatgggcaggcagtcccccgtgatcgtcttgttcacgtaaggcgacagggcgaccacgctagagacccccgagatgggcaggtagcgcgtgaggccgcccgcgggggcggccccggaagtctccgcgtggcgcgtcttccgggcacacttcctcggcccccgcggcccagaagcagcgcgggggccgagggaggtttcctcttgtctccctcccagggcaccgacggccccgcccgaggaggcggaagcggaggaggacgcggccccggcggcggaagaggcggcccccgcgggagtcggggccgaggaggaagaggcagaggaggaagaggcggaggccgccgaggacgtcaggggggtcccgggcccaccctggccgcgcccccccggccctgagtcggagggggggtgcgtcgccgccctcttggcccctgccggcgcgagggggggacgcgtggactggggggaggggttttcctggcccgacccgcgcctcttcctcggacgcaccgccgcctcctgctcgacagaggcggcggaggggagcgggggggcgccggagggggcggcgccgcgggagggcccgtgtccaccctccacgcccggcccccccgagccgcgcgccaccgtcgcacgcgcccggcacagactctgttcttggttcgcggcctgagccagggacgagtgcgactggggcacacggcgcgcgtccgcgggggccggggcgcgggggccgggccccggaggcggcgctcgcacgcacggggccacggccgcgcgggggcgcgcgggtcccgacgcggccgaggacgcggtgggcccggggcggggggcggagcctggcatgggcgccgcggggggcctgtggggagaggccgggggggagtcgctgatcactatggggtctctgttgtttgcaaggggggcgggtctgttgacaagggggcccgtccggcccctcggccgccccgcctccgcttcaacaaccccaaccccaaccccaacccccccggaggggccagacgccccccgcggcgccgcggctcgcgactggcgggagccgccgccgccgccgctgctgttggtggtggtgttggtgttactgctgccgtgtggcccgatgggcgccgaggggggcgctgtccgagccgcggccggctggggggctgcgtgagacgccccgcccgtcacggggggcgcggcggcgcctctgcgtgggggggcgcggggcgtccggcggggggcgggcggtacgtagtctgctgcaagagacaacggggggcgcgatcaggttacgccccctcccaggccctccctttccgcgcccgccctttcctcgcccccccgcccgcctattcctccctcccccctcctcctcctcctcccccagggtcctcgccgcccccccgcctcaccgtcgtccaggtcgtcgtcatcctcgtccgtggtgggctcagggtgggtgggcgacagggccctcaccgtgtgcccccccagggtcaggtaccgcggggcgaaccgctgattgcccgtccagataaagtccacggccgtgcccgccctgacggcctcctcggcctccatgcgggtctgggggtcgttcacgatcgggatggtgctgaacgacccgctgggcgtcacgcccactatcaggtacaccagcttggcgttgcacagcgggcaggtgttgcgcaattgcatccaggttttcatgcacgggatgcagaagcggtgcatgcacgggaaggtgtcgcagcgcaggtggggcgcgatctcatccgtgcacacggcgcacacgtcgccctcgtcgctccccccgtcctctcgagggggggcgcccccgcaactgccggggtcttcctcgcggggggggctcccccccgagaccgcccccccatccacgccctgcggccccagcagccccgtctcgaacagttccgtgtccgtgctgtccgcctcggaggcggagtcgtcgtcatggtggtcggcgtccccccgcccccccacttcggtctccgcctcagagtcgctgctgtccggcaggtctcggtcgcagggaaacacccagacatccggggcgggctaaggggaaaaaaaggggggcgggtaagaatggggggatttcccgcgtcaatcagcgcccacgagttccccctctccccccccccgcctcacaaagtcctgcccccctgctggcctcggaagaggggggagaaaggggtctgcaaccaaaggtggtctgggtccgtcctttggatcccgacccctcttcttccctcttctcccgccctccagacgcaccggagtcgggggtcccacggcgtcccccaaatatggcgggcggctcctccccacccccctagatgcgtgtgagtaagggggccctgcgtatgagtcagtggggaccacgccccctaacacggcgaccccggtccctgtgtgtttgttgtgggggcgtgtctctgtgtatgagtcagggggtcccacggcgaccccgggccctgcgtctgagtcaaaggggccatgtgtatgtgttggggggtctgtatatataaagtcagggggtcacatggcgacccccaacagggcgaccccggtccctgtatatatagggtcagggggttccgcgccccctaacatggcgcccccggtccctgtatatatagtgtcacggggttccacgccccctaacatggcgcccggctcccgtgtatgagtgggggtcccccaacatggcggccggttccagtgtaagggtcgggggtcccccaacatggcgccccccaatatggcgccccccaatatggcgccccagacatggcgcccggcccctcacctcgcgctgggggcggccctcaggccggcgggtactcgctccggggcggggctccatgggggtcgtatgcggttggagggtcgcggacggagggtccctgggggtcgcaacgtaggcggggcttctgtggtgatgcggagagggggcggcccgagtctgcctggctgctgcgtctcgctccgagtgccgaggtgcaaatgcgaccagactgtcgggccagggctaacttataccccacgcctttcccctccccaaaggggcggcagtgacgattcccccaatggccgcgcgtcccaggggaggcaggcccaccgcggggcggccccgtccccggggaccaacccggcgcccccaaagaatatcattagcatgcacggcccggcccccgatttgggggaccaacccggtgtcccccaaagaaccccattagcatgcccctcccaccgacgcaacaggggcttggcctgcgtcggtgccccggggcttcccgccttcccgaagaaactcattaccatacccggaaccccaggggaccaatgcgggttcattgagcgacccgcgggccaatgcgcgaggggccgtgtgttccgccaaaaaagcaattagcataacccggaaccccaggggagtggttacgcgcggcgcgggaggcggggaataccggggttgcccattaagggccgcgggaattgccggaagcgggaagggcggccggggccgcccattaatgagtttctaattaccataccgggaagcggaacaaggcctcttgtaagtttttaattaccataccgggaagtgggcggcccggcccactgggcggtaactcccgcccagtgggccgggccccgaagactcggcggacgctggttggccgggccccgccgcgctggcggccgccgattggccagtcccgccctccgagggcgggcccgcctcgggggcgggccggctcccagcgtatatatgcgcggctcctgccatcgtctctccggagagcggcttggtgcggagctcccgggagctccgcggaagacccaggccgcctcgggtgtaacgttagaccgagttcgccgggccggctccgcgggccagggcccgggcacgggcctcgggccccaggcacggcccgatgaccgcctcggcctccgccacccggcgccggaaccgagcccggtcggcccgctcgcgggcccacgagccgcggcgcgccaggcgggcggccgaggcccagaccaccaggtggcgcacccggacgtggggcgagaagcgcacccgcgcgggggtcgcgggggtcgcgggggtcgcgggggtcgcgggggtcgcggggggctccggcgccccctccccgcccgcgcgtcgcaggcgcaggcgcgccaggtgctctgcggtgacgcgcaggcggagggcgaggcgcggcggaaggcggaaggggcgtgagggggggtgggaggggttagccccgccccccgggcccgcgccgggcggtggggaccgggggcggggggcggcggcggtgggccgggcctctggcgccggctcgggcggggggctgtccggccagtcgtcgtcatcgtcgtcgtcggacgcggactcgggaacgtggagccactggcgcagcagcagcgaacaagaaggcgggggcccactggcggggggcggcggcggggcggccgcgggcgcgctcctgaccgcgggttccgagttgggcgtggaggttacctgggactgtgcggttgggacggcgcccgtgggcccgggcggccgggggcggcgggggccgcgatggcggcggcggcgggccatggagacagagagcgtgccggggtggtagagtttgacaggcaagcatgtgcgtgcagaggcgagtagtgcttgcctgtctaactcgctcgtctcggccgcggggggcccgggctgcgccgccgcgctttaaagggccgcgcgcgacccccggggggtgtgtttcggggggggcccgttttccgctcctccccccgctcctccccccgctcctccccccgctcctccccccgctcctccccccgctcctccccccgctcctccccccgctcctccccccgctcctccccccgctcctccccccgctcctccccccgctcctccccccgctcctccccccgctcctccccccgctcctccccccgctcctccccccgctcctccccccgctcctccccccgctccccaacgcccgccgcgcgcgcgcacgccgcccggaccgccgcccgccttttttgcgcgccgccccgcccgcggggggcccgggctgccacaggtgtaacaacaccaacagaacaccaacagcacggcgcaccggcgactccggttcctcatccacacgtcacacgtcacgtcatccaccacacctgcccaccaacacaactcacagcgacaactcaccgcgcaacaactcctgttcctcatccacacgtcaccgcgcaccccccgctcctccagacgtcccccagcgcaacacgccgctcctgtcacacaccaccgccccagccctccccagccccagccctccccagccccagccctccccggccccagccctccccggccccagccctccccggccccagccctccccggccccagccctccccggccccagccctccccggccccagccctccccggccgcgtcccgcgctccctcgggggggttcgggcatctctacctcagtgccgccaatctcaggtcagagatccaaaccctccgggggcgcccgcgcaccaccaccgcccctcgccccctcccgcccctcgccccctcccgcccctcgccccctcccgcccctcgccccctcccgcccctcgccccctcccgcccctcgccccctcccgcccctcgccccctcccgcccctcgccccctcccgcccctcgccccctcccgcccctcgccccctcccgcccctcgccccctcccgcccctcgccccctcccgcccctcgccccctcccgcccctcgccccctcccgcccctcgccccctcccgcccctcgccccctcccgcccctcgccccctcccgcccctcgccccctcccgcccctcgccccctcccgcccctcgaaataaacaacgctactgcaaaactaaatcaggtcgttgtcgtttattgcgtcttcgggtttcgcaagcgccccgccccgtcccggcccgttacagcaccccgtccccctcgaacgcgccgccgtcgtcgtcgtcccaggcgccttcccagtccacaacttcccgtcgcgggggcgtggccaagcccgcctccgcccccagcacctccacggcccccgccgccgccagcacggtgccgctgcggcccgtggccgaggcccagcgaatcccgggcaacgccggcggcagggcccccgggccgtcgtcgtcgtcgtcgccgccgcgcagcaccagcgggggggcgtcgtcgtcgggctccagcagggcgcgggcgcaaaagtccctccgcggcccgcgccaccgggccgggccggcgcgcaccgcctcgcgccccagcgccacgtacacgggccgcagcggcgcgcccaggccccagcgcgcgcaggcgcggtgcgagtgggcctcctcctcgcagaagtccggcgcgccgggcgccatggcgtcggtggtccccgaggccgccgcccggccgtccagcgccggcagcacggcccggcggtactcgcgcggggacatgggcaccggcgtgtccgggccgaagcgcgtgcgcacgcggtagcgcacgttgccgccgcggcacaggcgcagcggcggcgcgtcggggtacaggcgcgcgtgcgcggcctccacgcgcgcgaagacccccgggccgaacacgcggcccggggccagcaccgtgcggcgcaggtcccgcgccgccggccagcgcacggcgcactgcacggcgggcagcaggtcgcacgccaggtaggcgtgctgccgcgacaccgcgggcccgtcggcgggccagtcgcaggcgcgcacggtgttgaccacgatgagccgccggtcgccggcgctggcgagcagccccagaaactccacggccccggcgaaggccaggtcccgcgtggacagcagcagcacgccctgcgcgcccagcgccgacacgtcgggggcgccggtccagttgcccgcccaggcggccgtgtccggcccgcacagccggttggccagggccgccagcaggcaggacagcccgccgcgctcggcggaccactccggcggcccccccgaggccccgccgccggccaggtcctcgcccggcagcggcgagtacagcaccaccacgcgcacgtcctcggggtcggggatctggcgcatccaggccgccatgcggcgcagcgggcccgaggcgcgcagggggccaaagaggcggcccccggcggccccgtgggggtgggggttatcgtcgtcgtcgccgccgccgcacgcggcctgggcggcggcggcgggcccggcgcaccgcgcggcgatcgaggccagggcccgcgggtcaaacatgagggccggtcgccaggggacggggaacagcgggtggtccgtgagctcggccacggcgcgcggggagcagtaggcctccagggcggcggccgcgggcgccgccgtgtggctgggccccgggggctgccgccgccagccgcccagggggtcggggccctcggcgggccggcgcgacagcgccacggggcgcgggcgggcctgcgccgcggcggcccggggcgccgcgggctgggcgggggcgggctcgggccccgggggcgtggaggggggcgcggggaggggggcgcgggcgtccgagccgggggcgtccgcgccgctcttcttcgtcttcgggggtcgcgggccgccgcctccgggcggccgggccgggccgggactcttgcgcttgcgcccctcccgcggcgcggcggaggcggcggcggccgccagcgcgtcggcggcgtccggtgcgctggcggccgccgccagcagggggcgcaggctctggttctcaaacagcaggtccgcggcggcggcggccgcggagctcggcaggcgcgggtcccgcggcagcgcggggcccagggccccggcgaccaggctcacggcgcgcacggcggccacggcggcctcgctgccgccggccacgcgcaggtccccgcgcaggcgcatgagcaccagcgcgtcgcgcacgaaccgcagctcgcgcagccacgcgcgcaggcggggcgcgtcggcgtgcggcggcggcggggaagcggggcccgcgggtccctccggccgcggggggctggcgggccgggccccggccagccccgggacggccgccaggtcgccgtcgaagccctcggccagcgcctccaggatcccgcggcaggcggccaggcactccacggccacgcggccggcctgggcgcggcgcccggcgtcgtcgtcggcgtcggcgtggcgggcggcgtcggggtcgtcgccccccgcgggggaggcgggcgcggcggacagccgccccagggcggcgaggatccccgcggcgccgtacccggcgggcaccgcgcgctcgcccggtgcggcggcggcggcgacgacggcggcggcgaccccctcgtcatctgcgccggcgccggggctccccgcggcccccgtcagcgccgcgttctcgcgcgccaacaggggcgcgtaggcgcggcgcaggctggtcagcaggaagcccttctgcgcgcggtcgtatcggcggctcatggccacggcggccgccgcgtgcgccaggccccagccgaagcggccggccgccatggcgtagcccaggtggggcacggcccgcgccacgctgccggtgatgaaggagctgctgttgcgcgcggcgcccgagatccggaagcaggcctggtccagcgccacgtccccggggaccacgcgcgggttctggagccaccccatggcctccgcgtccggggtgtacagcagccgcgtgatcagggcgtactgctgcgcggcgtcgcccagctcgggcgcccacacggccgccggggcgcccgaggcctcgaaccggcgtcgcgcctcctccgcctcgggcgccccccagaggcccgggcggctgtcgcccaggccgccgtacagcacccgccccgggggcgggggcccggcgccgggccacggctccccgctgacgtacccgtcgcgatagcgcgcgtagaaggcgccggaggccgcgtcggcgtccagctcgacccgccggggctgcccggccgtgaagcggcccgtggcgtcgcggccggccaccgccgcgcgggcccggcggcgctcgatgcggcccgcggaggccgcgggggtcctcgccgccgcccggggcttgggcgcggcctcggagagggggggtggcccgggcgggggcggcgtccgcccgggggcttccggcgccgcgctcgacggaccccgcccgacggcccgcgcctcgcgtgcgcggtcggccgcgtcgttgccgtcgtcgtcctcgtcctcgtcggacgacgaggacgaagaggatgcggacgacgaggacgaggacccggagtccgacgaggtcgatgacgccgatggccgccgccggccgtgacgacgtctccgcggcggctgggccggcgggcgcggcgacaggcggtccgtggggtccggatacgcgccgcgtagcggggcctcccgtgcgcggccccgggccggggcccggtcgccggcggcgtcggctgcgtcgtcgtactcgtccccgtcatcgtcgtcggctcgaaaggcgggggtccggggcggcgaggccgcggggtcgggcgtcgggatcgtccggacggcctcctctaccatggaggccagcagggccagctgtcgcggcgagacggcgtccccggcgtcctcgccggcgtcggtgcccgccgcgggggccctcccgtcccgccgggcgtcgtcgaggtcgtgggggtggtcggggtcgtggtcggggtcgtccccgccctcctccgtctccgcgccccacccgagggccccccgctcgtcgcggtctgggctcggggtgggcggcggcccgtcggtggggcccggggagccggggcgctgcttgttctccgacgccatcgccgatgcggggcgatcctccggggatacggctgcgacggcggacgtagcacggtaggtcacctacggactctcgatggggagggggcgagacccacggaccccgacgacccccgccgtcgacgcggaactagcgcggaccggtcgatgcttgggtgggaaaaaggacagggacggccgatccccctcccgcgcttcgtccgcgtatcggcgtcccggcgcggcgagcgtctgacggtctgtctctggcggtcccgcgtcgggtcgtggatccgtgtcggcagccgcgctccgtgtggacgatcggggcgtcctcgggctcatatagtcccaggggccggcgggaaggaggagcagcggaggccgccggccccccgccccccaggcgggcccgccccgaacggaattccattatgcacgaccccgccccgacgccggcacgccgggggcccgtggccgcggcccgttggtcgaacccccggccccgcccatccgcgccatctgccatgggcggggcgcgagggcgggtgggcccgcgccccgccccgcatggcatctcattaccgcccgatccggtggtttccgcttccgttccgcatgctaacgaggaacgggccgggggcggggcccgggccccgacttcccggttcggcggtaatgagatacgagccccgcgcgcccgttggccgtccccgggcccccggtcccgcccgccggacgttgggaccaacgggacggcgggcggcccaagggccgcccgccttgccgcccccccattggccggcgggcgggaccgccccaagggggcggggccgccgggtaaaagaagtgagaacgcgaagcgttcgcacttcgtcccaatatatatatattattagggcgaagtgcgagcactggcgccgtgcccgactccgcgccggccccgggggcgggcccgggcggcggggggcgggtctctccggcgcacataaaggcccggcgcgaccgacgcccgcagacggcgccggccacgaacgacgggagcggctgcggagcacgcggaccgggagcgggactcgcagagggccgtcggagcggacggcgtcggcatcgcgacgccccggctcgggatcgggatcgcatcggaaagggacacgcggaaagacccacccaccccacccacgaaacacaggggacgcaccccgggggcctccgacgacagaaacccaccggtccgcctttgtgcacgggtaagcaccttgggtgggcggaggagggggggacgcgggggcggaggaggggggacgcgggggcggaggaggggggacgcgggggcggaggaggggggacgcgggggcggaggaggggggacgcgggggcggaggagggggctcacccgcgttcgtgccttcccgcaggaggaacgtcctcgtcggggcgaccggcggcgaccgttgcgtggaccgcttcctgctcgtcgggcggggggaagccactgtggtcctccgggacgttttctggatggccgacatttccccaggcgcttttgcgccttgtgtaaaagcgcggcgtcccgctctccgatccccgcccctgggcacgcgcaagcgcaagcgcccttcccgccccctctcatcggagtctgaggtagaatccgatacagccttggagtctgaggtcgaatccgagacagcatcggattcgaccgagtctggggaccaggatgaagccccccgcatcggtggccgtagggccccccggaggcttggggggcggttttttctggacatgtcggcggaatccaccacggggacggaaacggatgcgtcggtgtcggacgaccccgacgacacgtccgactggtcttatgacgacattcccccacgacccaagcgggcccgggtaaacctgcggctcacgagctctcccgatcggcgggatggggttatttttcctaagatggggcgggtccggtctacccgggaaacgcagccccgggcccccaccccgtcggccccaagcccaaatgcaatgctacggcgctcggtgcgccaggcccagaggcggagcagcgcacgatggacccccgacctgggctacatgcgccagtgtatcaatcagctgtttcgggtcctgcgggtcgcccgggacccccacggcagtgccaaccgcctgcgccacctgatacgcgactgttacctgatgggatactgccgagcccgtctggccccgcgcacgtggtgccgtttgctgcaggtgtccggcggaacctggggcatgcacctgcgcaacaccatacgggaggtggaggctcgattcgacgccaccgcggaacccgtgtgcaagcttccttgtttggagaccagacggtacggcccggagtgtgatcttagtaatctcgagattcatctcagcgcgacaagcgatgatgaaatctccgatgccaccgatctggaggccgccggttcggaccacacgctcgcgtcccagtccgacacggaggatgccccctcccccgttacgctggaaaccccagaaccccgcgggtccctcgctgtgcgtctggaggatgagtttggggagtttgactggaccccccaggagggctcccagccctggctgtctgcggtcgtggccgataccagctccgtggaacgcccgggcccatccgattctggggcgggtcgcgccgcagaagaccgcaagtgtctggacggctgccggaaaatgcgcttctccaccgcctgcccctatccgtgcagcgacacgtttctccggccgtgagtccggtcgccccgacccccttgtatgtccccaaataaaagaccaaaatcaaagcgtttgtcccagcgtcttaatggcgggaagggcggagagaaacagaccacgcgtacatggggggtgtttgggggtttattgacatcggggctacagggtggtaaccggatagcagatgtgaggaagtctgggccgttcgccgcgaacggcgatcagagggtccgtttcttgcggaccacggcccggtgatgtgggttgctcgtctgggatctcgggcatgcccatacacgcacaacacggacgccgcaccggatgggacgtcgtaagggggcctggggtagctgggtggggtttgtgcagagcaatcagggaccgcagccagcgcatacaatcgcgctcccgtccgtttgtcccgggcagtaccacgccgtactggtattcgtaccggctgagcagggtctccagggggtggttgggggccgcggggaacggggtccacgccacggtccactcgggcaaaaaccgagtcggcacggcccacggttctcccacccacgcgtctggggtcttgatggcgataaatcttaccccgagccggattttttgggcgtattcgagaaacggcacacacagatccgccgcgcctaccacccacaagtggtagaggcgaggggggctgggttggtctcggtgcagcagtcggaagcacgccacggcgtccacgacctcggtgctctccaaggggctgtcctccgcaaacaggcccgtggtggtgtttggggggcagcgacaggacctagtgcgcacgatcgggcgggtgggtttgggtaagtccatcagcggctcggccaaccgtcgaaggttggccggacgaacgacgaccggggtacccaggggttctgatgccaaaatgcggcactgcctaaacaggaagctccacagggccgggcttgcgtcgacggaagtccggggcagggcgttgttctggtcaaggagggtcattacgttgacgacaacaacgcccatgttggtatattacaggcccgtgtccgatttggggcacttgcagatttgtaaggccacgcacggcggggagacaggccgacgcgggggctgctctaaaaatttaagggccctacggtccacagacccgccttcccgggggggcccttggagcgaccggcagcggaggcgtccgggggaggggagggtgatttacgggggggtaggtcagggggtgggtcgtcaaactgccgctccttaaaaccccggggcccgtcgttcggggtgctcgttggttggcactcacggtgcggcgaatggcctgtcgtaagttttgtcgcgtttacgggggacagggcaggaggaaggaggaggccgtcccgccggagacaaagccgtcccgggtgtttcctcatggccccttttataccccagccgaggacgcgtgcctggactccccgcccccggagacccccaaaccttcccacaccacaccacccggcgatgccgagcgcctgtgtcatctgcaggagatcctggcccagatgtacggaaaccaggactaccccatagaggacgaccccagcgcggatgccgcggacgatgtcgacgaggacgccccggacgacgtggcctatccggaggaatacgcagaggagctttttctgcccggggacgcgcccggtccccttatcggggccaacgaccacatccctcccccgtgtggcgcatctccccccggtatacgacgacgcagccgggatgagattggggccacgggatttaccgcggaagaactggacgccatggacagggaggcggctcgagccatcagccgcggcggcaagcccccctcgaccatggccaagctggtgactggcatgggctttacgatccacggagcgctcaccccaggatcggaggggtgtgtctttgacagcagccacccagattacccccaacgggtaatcgtgaaggcggggtggtacacgagcacgagccacgaggcgcgactgctgaggcgactggaccaccccgcgatcctgcccctcctggacctgcatgtcgtctccggggtcacgtgtctggtcctccccaagtaccaggccgacctgtatacctatctgagtaggcgcctgaacccgctgggacgcccgcagatcgcagcggtctcccggcagctcctaagcgccgttgactacattcaccgccagggcattatccaccgcgacattaagaccgaaaatatttttattaacacccccgaggacatttgcctgggggactttggtgccgcgtgcttcgtgcagggttcccgatcaagccccttcccctacggaatcgccggaaccatcgacaccaacgcccccgaggtcctggccggggatccgtataccaccaccgtcgacatttggagcgccggtctggtgatcttcgagactgccgtccacaacgcgtccttgttctcggccccccgcggccccaaaaggggcccgtgcgacagtcagatcacccgcatcatccgacaggcccaggtccacgttgacgagttttccccgcatccagaatcgcgcctcacctcgcgctaccgctcccgcgcggccgggaacaatcgcccgccgtacacccgaccggcctggacccgctactacaagatggacatagacgtcgaatatctggtttgcaaagccctcaccttcgacggcgcgcttcgccccagcgccgcagagctgctttgtttgccgctgtttcaacagaaatgaccgcccccagggggcggtgctgtttgcgggttggcacaaaaagaccccgacccgcgtctgtggtgtttttggcatcatgtcgccgggcgccatgcgtgccgttgttcccattatcccattccttttggttcttgtcggtgtatcgggggttcccaccaacgtctcctccaccacccaaccccaactccagaccaccggtcgtccctcgcatgaagcccccaacatgacccagaccggcaccaccgactctcccaccgccatcagccttaccacgcccgaccacacaccccccatgccaagtatcggactggaggaggaggaagaggaggagggggccggggacggcgaacatcttgaggggggagatgggacccgtgacaccctaccccagtccccgggcccagccttcccgttggctgaggacgtcgagaaggacaaacccaaccgtcccgtagtcccatcccccgatcccaacaactcccccgcgcgccccgagaccagtcgcccgaagacaccccccaccattatcgggccgctggcaactcgccccacgacccgactcacctcaaagggacgacccttggttccgacgcctcaacataccccgctgttctcgttcctcactgcctcccccgccctggacaccctcttcgtcgtcagcaccgtcatccacaccttatcgtttttgtgtattggtgcgatggcgacacacctgtgtggcggttggtccagacgcgggcgacgcacacaccctagcgtgcgttacgtgtgcctgccgtccgaacgcgggtagggtatggggcgggggatggggagagcccacacgcggaaagcaagaacaataaaggcggtggtatctagttgatatgcatctctgggtgtttttggggtgtggcggacgcggggcggtcattggacggggtgcagttaaatacatgcccgggacccatgaagcatgcgcgacttccgggcctcggaacccacccgaaacggccaacggacgtctgagccaggcctggctatccggagaaacagcacacgacttggcgttctgtgtgtcgcgatgtctctgcgcgcagtctggcatctggggcttttgggaagcctcgtgggggctgttcttgccgccacccatcggggacctgcggccaacacaacggaccccttaacgcacgccccagtgtcccctcaccccagccccctggggggctttgccgtccccctcgtagtcggtgggctgtgcgccgtagtcctgggggcggcgtgtctgcttgagctcctgcgtcgtacgtgccgcgggtgggggcgttaccatccctacatggacccagttgtcgtataatttcccccccccccccccttctccgcatgggtgatgtcgggtccaaactcccgacaccaccagctggcatggtataaatcaccggtgcgccccccaaaccatgtccggcagggggatgggggggcgaatgcggagggcacccaacaacaccgggctaaccaggaaatccgtggccccggcccccaataaagatcgcggtagcccggccgtgtgacactatcgtccataccgaccacaccgacgaatcccctaagggggaggggccattttacgaggaggaggggtataacaaagtctgtctttaaaaagcaggggttagggagttgttcggtcataagcttcagcgcgaacgaccaactaccccgatcatcagttatccttaaggtctcttttgtgtggtgcgttccggtatggggggggctgccgccaggttgggggccgtgattttgtttgtcgtcatagtgggcctccatggggtccgcggcaaatatgccttggcggatgcctctctcaagatggccgaccccaatcgctttcgcggcaaagaccttccggtcctggaccagctgaccgaccctccgggggtccggcgcgtgtaccacatccaggcgggcctaccggacccgttccagccccccagcctcccgatcacggtttactacgccgtgttggagcgcgcctgccgcagcgtgctcctaaacgcaccgtcggaggccccccagattgtccgcggggcctccgaagacgtccggaaacaaccctacaacctgaccatcgcttggtttcggatgggaggcaactgtgctatccccatcacggtcatggagtacaccgaatgctcctacaacaagtctctgggggcctgtcccatccgaacgcagccccgctggaactactatgacagcttcagcgccgtcagcgaggataacctggggttcctgatgcacgcccccgcgtttgagaccgccggcacgtacctgcggctcgtgaagataaacgactggacggagattacacagtttatcctggagcaccgagccaagggctcctgtaagtacgccctcccgctgcgcatccccccgtcagcctgcctgtccccccaggcctaccagcagggggtgacggtggacagcatcgggatgctgccccgcttcatccccgagaaccagcgcaccgtcgccgtatacagcttgaagatcgccgggtggcacgggcccaaggccccatacacgagcaccctgctgcccccggagctgtccgagacccccaacgccacgcagccagaactcgccccggaagaccccgaggattcggccctcttggaggaccccgtggggacggtggcgccgcaaatcccaccaaactggcacataccgtcgatccaggacgccgcgacgccttaccatcccccggccaccccgaacaacatgggcctgatcgccggcgcggtgggcggcagtctcctggcagccctggtcatttgcggaattgtgtactggatgcgccgccgcactcaaaaagccccaaagcgcatacgcctcccccacatccgggaagacgaccagccgtcctcgcaccagcccttgttttactagatacccccccttaatgggtgcgggggggtcaggtctgcggggttgggatgggaccttaactccatataaagcgagtctggaaggggggaaaggcggacagtcgataagtcggtagcgggggacgcgcacctgttccgcctgtcgcacccacagctttttttgcgaaccgtcccgttccgggatgccgtgccgcccgttgcagggcctggtgctcgtgggcctctgggtctgtgccaccagcctggttgtccgtggccccacggtcagtctggtatcaaactcatttgtggacgccggggccttggggcccgacggcgtagtggaggaagacctgcttattctcggggagcttcgctttgtgggggaccaggtcccccacaccacctactacgatggggtcgtagagctgtggcactaccccatgggacacaaatgcccacgggtcgtgcatgtcgtcacggtgaccgcgtgcccacgtcgccccgccgtggctttcgccctgtgtcgcgcgaccgacagcactcacagccccgcatatcccaccctggagctgaatctggcccaacagccgcttttgcgggtccggagggcgacgcgtgactatgccggggtgtacgtgttacgcgtatgggtcggggacgcaccaaacgccagcctgtttgtcctggggatggccatagccgccgaagggactctggcgtacaacggctcggcccatggctcctgcgacccgaaactgcttccgtattcggccccgcgtctggccccggcgagcgtataccaacccgcccctaacccggcctccaccccctcgaccaccacctccaccccctcgaccaccacctccaccccctcgaccaccatccccgctccccaagcatcgaccacacccttccccacgggagacccaaaaccccaacctcacggggtcaaccacgaacccccatcgaatgccacgcgagcgacccgcgactcgcgatacgcgctaacggtgacccagataatccagatagccatccccgcgtccattatagccctggtgtttctggggagctgtatttgctttatacacagatgtcaacgccgctaccgacgctcccgccgcccgatttacaacccccagatacccactggcatctcatgcgcggtgaacgaagcggccatggcccgcctcggagccgagctcaaatcgcatccgagcaccccccccaaatcccggcgccggtcgtcacgcacaccaatgccctccctgacggccatcgccgaagagtcggagcccgcgggggcggctgggcttccgacgccccccgtggaccccacgacatccaccccaacgcctcccctgttggtataggtccacggccactggccgggggcaccacataaccgaccgcagtcactgagttgggaataaaccggtattatttacctatatacgtgtatgtccatttcttcccccccccccccggaaaccaaagaaggaaacaaagaatggatgggaggagttcaggaagccggggagagggcccgcggcgcatttaaggcgttgttgtgttgactttggctcttctggcgggttggtgcggtgctgtttgttgggctcccattttacccgaagatcggctgctatccccgggacatggatcgcggggcggtggtggggtttcttctcggtgtttgtgttgtatcgtgcttggcgggaacgcccaaaacgtcctggagacgggtgagtgtcggcgaggacgtttcgttgcttccagctccggggcctacggggcgcggcccgacccagaaactactatgggccgtggaacccctggatgggtgcggccccttacacccgtcgtgggtctcgctgatgccccccaagcaggtgcccgagacggtcgtggatgcggcgtgcatgcgcgctccggtcccgctggcgatggcgtacgcccccccggccccatctgcgaccgggggtctacggacggacttcgtgtggcaggagcgcgcggccgtggttaaccggagtctggttatttacggggtccgagagacggacagcggcctgtataccctgtctgtgggcgacataaaggacccggctcgccaagtggcctcggtggtcctggtggtgcaaccggccccagttccgaccccacccccgaccccagccgattacgacgaggatgacaatgacgagggcgagggcgaggacgaaagtctagccggcactcccgccagcgggaccccccggctcccgcctccccccgcccccccgaggtcttggcccagcgcccccgaagtctcacacgtgcgtggggtgaccgtgcgtatggagactccggaagctatcctgttttcccccggggaggcgtttagcacgaacgtctccatccatgccatcgcccacgacgaccagacctacaccatggacgtcgtctggttgaggttcgacgtgccgacctcgtgtgccgagatgcgaatatacgaatcgtgtctgtatcacccgcagctcccagagtgtctgtccccggccgacgctccgtgcgccgcgagtacgtggacgtctcgcctggccgtccgcagctacgcggggtgttccagaacaaaccccccgccgcgctgttcggccgaggctcacatggagcccttcccggggctggcgtggcaggcggcctccgtcaatctggagttccgggacgcgtccccacaacactccggcctgtatctgtgcgtggtgtacgtcaacgaccatattcacgcatggggccacattaccatcagcaccgcggcgcagtaccggaacgcggtggtggaacagcccctcccacagcgcggcgcggatttggccgagcccacccacccgcacgtcggggcccctccccacgcgcccccaacccacggcgccctgcggttaggggcggtgatgggggccgccctgctgctgtctgcgctggggttgtcggtgtgggcgtgtatgacctgttggcgcaggcgtgcctggcgggcggttaaaagcagggcctcgggtaaggggcccacgtacattcgcgtggccgacagcgagctgtacgcggactggagctcggacagcgagggagaacgcgaccaggtcccgtggctggcccccccggagagacccgactctccctccaccaatggatccggctttgagatcttatcaccaacggctccgtctgtatacccccgtagcgatgggcatcaatctcgccgccagctcacaacctttggatccggaaggcccgatcgccgttactcccaggcctccgattcgtccgtcttctggtaaggcgccccatcccgaggccccacgtcggtcgccgaactgggcgaccgccggcgaggtggacgtcggagacgagctaatcgcgatttccgacgaacgcggacccccccgacatgaccgcccgcccctcgccacgtcgaccgcgccctcgccacacccgcgacccccgggctacacggccgttgtctccccgatggccctccaggctgtcgacgccccctccctgtttgtcgcctggctggccgctcggtggctccggggggcttccggcctgggggccgtcctgtgtgggattgcgtggtatgtgacgtcaattgcccgaggcgcataaagggccggtggtccgcctagccgcagcaaattaaaaatcgtgagtcactgcgaccgcaacttcccacccggagctttcttccggcctcgatgacgtcccggctctccgatcccaactcctcagcgcgatccgacatgtccgtgccgctttatcccacggcctcgccagtttcggtcgaagcctactactcggaaagcgaagacgaggcggccaacgacttcctcgtacgcatgggccgccaacagtcggtattaaggcgtcgacgcagacgcacccgctgcgtcggcatggtgatcgcctgtctcctcgtggccgttctgtcgggcggatttggggcgctcctgatgtggctgctccgctaaaagaccgcatcgacacgcgcgtccttcttgtcgtctctcttcccccccatcaccccgcaatttgcacccagcctttaactacattaaattgggttcgattggcaatgttgtctcccggttgatttttgggtgggtggggagtgggtgggtggggagtgggtgggtggggagtgggtgggtggggagtgggtgggtggggagtgggtgggtggggagtgggtgggtggggagtgggtgggtggggagtgggtgggtggggagtgggtgggtggggagtggcaaggaagaaacaagcccgaccaccagacagaaaatgtaaccatacccaaaccgactctgggggctgtttgtggggtcggaaccataggatgaacaaaccaccccgtacctcccgcacccttgggtgcgggtggctcatcggcatctgtccggtatgggttgttccccacccacttgcgttcggacgtcttagaatcatggcggttttctatgccgacatcggttttctcccccgcaataagacacgatgcgataaaatctgtttgtgaaatttattaagggtacaaattgccctagcacaggggtggggttagggccgggtccccacacccaaacgcaccaaacagatgcaggcagtgggtcgagtacagccccgcgtacgaacacgtcgatgcgtgtgtcagacagcaccagaaagcacaggccatcaacaggtcgtgcatatgtcggtgggtttggacgcggggggccatggtggtgataaagttaatggccgccgtccgccagggccacaggggcgacgtctcttggttggcccggagccactgggtgtggaccagccgcgcgtggcggcccaacatggcccctgtagccgggggcgggggatcgcgcacgtttgcagcgcacatgcgagacacctcgaccacggttcggaagaaggcccggtggtccgcgggcaacatcaccaggtgcgcaagcgcccgggcgtccagagggtagagccctgagtcatccgaggttggctcatcgcccgggtcatgccgcaagtgcgtgtgggttgggcttccggtgggcgggacgcgaaccgcggtgtggagccctacgcgggcccgagcgtacgctccatcttgtggggagaaggggtctgggctcgccaggggggcatacttgcccgggctatacagacccgcgagccgtacgtggttcgcggggggtgcgtggggtccggggctcccggggaggccggggctcccggggttgtcgtggatccctggggtcacgcggtaccctggggtctctgggagctcgcggtactctgggttccctaggttctcggggtggtcgcggaacccggggctcccggggaacacgcggtgtcctggggattgttggcggtcggacggcttcagatggcttcgagatcgtagtgtccgcaccgactcgtagtagacccgaatctccacattgccccgccgcttgatcattatcaccccgttgcgggggtccggagatcatgcgcgggtgtcctcgaggtgcgtgaacacctctggggtgcatgccggcggacggcacgccttttaagtaaacatctgggtcgcccggcccaactggggccgggggttgggtctggctcatctcgagagccacggggggaaccaccctccgcccagaaacttgggcgatggtcgtacccgggactcaacgggttaccggattacggggactgtcggtcacggtcccgccggttcttcgatgtgccacacccaaggatgcgttgggggcgattttgggcagcagcccgggagagcgcagcagaggacgctccgggtcgtgcacggcggttttggccgcctcccggtcctcacgcccccttttattgatctcatcgcgtacgtcggcgtacgtcctgggcccaacccgcatgttgtccaggaaggtgtccgccatttccagggcccacgacatgctcccccgcccgacgagcaggaagcggtccacgcaacggtcgccgccggtcgccccgacgagcaggaagcggtccacgcaacggtcgccgccggtcgcctcgacgaggacgttcctcctgcgggaaggcacgaacgcgggtgagccccctcctccgcccccgcgtcccccctcctccgcccccgcgtcccccctcctccgcccccgcgtcccccctcctccgcccccgcgtcccccctcctccgcccccgcgtcccccctcctccgcccccgcgtcccccctcctccacccccgcgtccccccctcctccgcccacccaaggtgcttacccgtgcacaaaggcggaccggtgggtttctgtcgtcggaggcccccggggtgcgtcccctgtgtttcgtgggtggggtgggtgggtctttccgcgtgtccctttccgatgcgatcccgatcccgagccggggcgtcgcgatgccgacgccgtccgctccgacggccctctgcgagtcccgctcccggtccgcgtgctccgcagccgctcccgtcgttcgtggccggcgccgtctgcgggcgtcggtcgcgccgggcctttatgtgcgccggagagacccgccccccgccgcccgggcccgcccccggggccggcgcggagtcgggcacggcgccagtgctcgcacttcgccctaataatatatatatattgggacgaagtgcgaacgcttcgcgttctcacttcttttacccggcggccccgcccccttggggcggtcccgcccgccggccaatgggggggcggcaaggcgggcggcccttgggccgcccgccgtcccgttggtcccaacgtccggcgggcgggaccgggggcccggggacggccaacgggcgcgcggggctcgtatctcattaccgccgaaccgggaagtcggggcccgggccccgcccccggcccgttcctcgttagcatgcggaacggaagcggaaaccaccggatcgggcggtaatgagatgccatgcggggcggggcgcgggcccacccgccctcgcgccccgcccatggcagatggcgcggatgggcggggccgggggttcgaccaacgggccgcggccacgggcccccggcgtgccggcgtcggggcggggtcgtgcataatggaattccgttcggggcgggcccgcctggggggcggggggccggcggcctccgctgctcctccttcccgccggcccctgggactatatgagcccgaggacgccccgatcgtccacacggagcgcggctgccgacacggatccacgacccgacgcgggaccgccagagacagaccgtcagacgctcgccgcgccgggacgccgatacgcggacgaagcgcgggagggggatcggccgtccctgtcctttttcccacccaagcatcgaccggtccgcgctagttccgcgtcgacggcgggggtcgtcggggtccgtgggtctcgccccctccccatcgagagtccgtaggtgacctaccgtgctacgtccgccgtcgcagccgtatccccggaggatcgccccgcatcggcgatggcgtcggagaacaagcagcgccccggctccccgggccccaccgacgggccgccgcccaccccgagcccagaccgcgacgagcggggggccctcgggtggggcgcggagacggaggagggcggggacgaccccgaccacgaccccgaccacccccacgacctcgacgacgcccggcgggacgggagggcccccgcggcgggcaccgacgccggcgaggacgccggggacgccgtctcgccgcgacagctggccctgctggcctccatggtagaggaggccgtccggacgatcccgacgcccgaccccgcggcctcgccgccccggacccccgcctttcgagccgacgacgatgacggggacgagtacgacgacgcagccgacgccgccggcgaccgggccccggcccggggccgcgcacgggaggccccgctacgcggcgcgtatccggaccccacggaccgcctgtcgccgcgcccgccggcccagccgccgcggagacgtcgtcacggccggcggcggccatcggcgtcatcgacctcgtcggactccgggtcctcgtcctcgtcgtccgcatcctcttcgtcctcgtcgtccgacgaggacgaggacgacgacggcaacgacgcggccgaccgcgcacgcgaggcgcgggccgtcgggcggggtccgtcgagcgcggcgccggaagcccccgggcggacgccgcccccgcccgggccaccccccctctccgaggccgcgcccaagccccgggcggcggcgaggacccccgcggcctccgcgggccgcatcgagcgccgccgggcccgcgcggcggtggccggccgcgacgccacgggccgcttcacggccgggcagccccggcgggtcgagctggacgccgacgcggcctccggcgccttctacgcgcgctatcgcgacgggtacgtcagcggggagccgtggcccggcgccgggcccccgcccccggggcgggtgctgtacggcggcctgggcgacagccgcccgggcctctggggggcgcccgaggcggaggaggcgcgacgccggttcgaggcctcgggcgccccggcggccgtgtgggcgcccgagctgggcgacgccgcgcagcagtacgccctgatcacgcggctgctgtacaccccggacgcggaggccatggggtggctccagaacccgcgcgtggtccccggggacgtggcgctggaccaggcctgcttccggatctcgggcgccgcgcgcaacagcagctccttcatcaccggcagcgtggcgcgggccgtgccccacctgggctacgccatggcggccggccgcttcggctggggcctggcgcacgcggcggccgccgtggccatgagccgccgatacgaccgcgcgcagaagggcttcctgctgaccagcctgcgccgcgcctacgcgcccctgttggcgcgcgagaacgcggcgctgacgggggccgcggggagccccggcgccggcgcagatgacgagggggtcgccgccgccgtcgtcgccgccgccgccgcaccgggcgagcgcgcggtgcccgccgggtacggcgccgcggggatcctcgccgccctggggcggctgtccgccgcgcccgcctcccccgcggggggcgacgaccccgacgccgcccgccacgccgacgccgacgacgacgccgggcgccgcgcccaggccggccgcgtggccgtggagtgcctggccgcctgccgcgggatcctggaggcgctggccgagggcttcgacggcgacctggcggccgtcccggggctggccggggcccggcccgccagccccccgcggccggagggacccgcgggccccgcttccccgccgccgccgcacgccgacgcgccccgcctgcgcgcgtggctgcgcgagctgcggttcgtgcgcgacgcgctggtgctcatgcgcctgcgcggggacctgcgcgtggccggcggcagcgaggccgccgtggccgccgtgcgcgccgtgagcctggtcgccggggccctgggccccgcgctgccgcgggacccgcgcctgccgagctccgcggccgccgccgccgcggacctgctgtttgagaaccagagcctgcgccccctgctggcggcggccgccagcgcaccggacgccgccgacgcgctggcggccgccgccgcctccgccgcgccgcgggaggggcgcaagcgcaagagtcccggcccggcccggccgcccggaggcggcggcccgcgacccccgaagacgaagaagagcggcgcggacgcccccggctcggacgcccgcgcccccctccccgcgcccccctccacgcccccggggcccgagcccgcccccgcccagcccgcggcgccccgggccgccgcggcgcaggcccgcccgcgccccgtggcgctgtcgcgccggcccgccgagggccccgaccccctgggcggctggcggcggcagcccccggggcccagccacacggcggcgcccgcggccgccgccctggaggcctactgctccccgcgcgccgtggccgagctcacggaccacccgctgttccccgtcccctggcgaccggccctcatgtttgacccgcgggccctggcctcgatcgccgcgcggtgcgccgggcccgccgccgccgcccaggccgcgtgcggcggcggcgacgacgacgataacccccacccccacggggccgccgggggccgcctctttggccccctgcgcgcctcgggcccgctgcgccgcatggcggcctggatgcgccagatccccgaccccgaggacgtgcgcgtggtggtgctgtactcgccgctgccgggcgaggacctggccggcggcggggcctcgggggggccgccggagtggtccgccgagcgcggcgggctgtcctgcctgctggcggccctggccaaccggctgtgcgggccggacacggccgcctgggcgggcaactggaccggcgcccccgacgtgtcggcgctgggcgcgcagggcgtgctgctgctgtccacgcgggacctggccttcgccggggccgtggagtttctggggctgctcgccagcgccggcgaccggcggctcatcgtggtcaacaccgtgcgcgcctgcgactggcccgccgacgggcccgcggtgtcgcggcagcacgcctacctggcgtgcgacctgctgcccgccgtgcagtgcgccgtgcgctggccggcggcgcgggacctgcgccgcacggtgctggccccgggccgcgtgttcggcccgggggtcttcgcgcgcgtggaggccgcgcacgcgcgcctgtaccccgacgcgccgccgctgcgcctgtgccgcggcggcaacgtgcgctaccgcgtgcgcacgcgcttcggcccggacacgccggtgcccatgtccccgcgcgagtaccgccgggccgtgctgccggcgctggacggccgggcggcggcctcggggaccaccgacgccatggcgcccggcgcgccggacttctgcgaggaggaggcccactcgcaccgcgcctgcgcgcgctggggcctgggcgcgccgctgcggcccgtgtacgtggcgctggggcgcgaggcggtgcgcgccggcccggcccggtggcgcgggccgcggagggacttttgcgcccgcgccctgctggagcccgacgacgacgcccccccgctggtgctgcgcggcggcgacgacgacgacgacggcccgggggccctgccgccggcgttgcccgggattcgctgggcctcggccacgggccgcagcggcaccgtgctggcggcggcgggggccgtggaggtgctgggggcggaggcgggcttggccacgcccccgcgacgggaagttgtggactgggaaggcgcctgggacgacgacgacggcggcgcgttcgagggggacggggtgctgtaacgggccgggacggggcggggcgcttgcgaaacccgaagacgcaataaacgacaacgacctgatttagttttgcagtagcgttgtttatttcgaggggcgggagggggcgaggggcgggagggggcgaggggcgggagggggcgaggggcgggagggggcgaggggcgggagggggcgaggggcgggagggggcgaggggcgggagggggcgaggggcgggagggggcgaggggcgggagggggcgaggggcgggagggggcgaggggcgggagggggcgaggggcgggagggggcgaggggcgggagggggcgaggggcgggagggggcgaggggcgggagggggcgaggggcgggagggggcgaggggcgggagggggcgaggggcgggagggggcgaggggcgggagggggcgaggggcggtggtggtgcgcgggcgcccccggagggtttggatctctgacctgagattggcggcactgaggtagagatgcccgaacccccccgagggagcgcgggacgcggccggggagggctggggccggggagggctggggccggggagggctggggccggggagggctggggccggggagggctggggccggggagggctggggccggggagggctggggctggggagggctggggctggggagggctggggcggtggtgtgtgacaggagcggcgtgttgcgctgggggacgtctggaggagcggggggtgcgcggtgacgtgtggatgaggaacaggagttgttgcgcggtgagttgtcgctgtgagttgtgttggtgggcaggtgtggtggatgacgtgacgtgtgacgtgtggatgaggaaccggagtcgccggtgcgccgtgctgttggtgttctgttggtgttgttacacctgtggcagcccgggccccccgcgggcggggcggcgcgcaaaaaaggcgggcggcggtccgggcggcgtgcgcgcgcgcggcgggcgttgggggagcggggggaggagcggggggaggagcggggggaggagcggggggaggagcggggggaggagcggggggaggagcggggggaggagcggggggaggagcggggggaggagcggggggaggagcggggggaggagcggggggaggagcggggggaggagcggggggaggagcggggggaggagcggggggaggagcggggggaggagcggggggaggagcggaaaacgggccccccccgaaacacaccccccgggggtcgcgcgcggccctttaaagcg

SEQ ID NO: 8 - DNA, 1863 bp, Mus musculus
gccaccatggagggagccgaagccggggcacgagccacctttggcccttgggattacggggtgtttgccaccatgttgctcgtcagtaccggaatcggtttgtgggtgggactcgctcggggcggtcagaggtccgcagatgatttctttacaggaggaaggcagctcgccgcagtgccagtagggttgtctctcgctgctagttttatgtctgcagtccaagtcctgggtgtaccagccgaagctgcccgatacggccttaaattcctttggatgtgcgtagggcaactcttgaatagtttgcttactgccctgctttttttgccaatcttttacagacttggtctgacaagtacctaccaatatttggagctgagattttctcgggcagtaaggctttgcgggactcttcagtatttggtggccactatgctctacacaggcatcgtcatctatgctcccgcattgattcttaatcaggtgaccggccttgacatctgggccagccttctctccactgggatcatttgcacactttatactacagttggcggtatgaaagctgtggtgtggactgacgtttttcaagtggtagttatgcttgtgggtttctgggtaatacttgctaggggggtaatgctgatgggagggccatggaacgtcctgagcctggcccaaaaccactcaagaattaacctgatggattttgatcccgacccaaggagccgatatacattttggaccttcgtggtcggcggttccttggtatggctttcaatgtatggggtaaaccaagctcaagtccaacgctatgtcgcttgccataccgagaggaaagctaaacttgcacttcttgtgaaccaacttggtctctttctcatagtggcaagcgctgcatgttgcggaattgttatgtttgtttattacaaagattgtgaccccttgcttactggccggatagccgcccccgatcagtatatgccccttctcgtgcttgatatattcgaggacctccccggtgttcccggactcttcctcgcatgtgcttactcaggcaccctttctaccgcctcaacctctatcaatgcaatggctgcagtcaccgtggaggacctcattaaacctcgaatgccatccctggccccaaggaaactcgtgtttatatccaagggcttgtccttcatatatggaagcacctgtctgacagtagcagcattgtcttctttgttgggcggcggggtactgcaggggtcttttacagtgatgggtgtaatctcaggcccccttttgggggcttttactctggggatgctcttgcccgcttgcaacacacctggcgtactctcaggactgactgccgggttggctgtttcactttgggttgcagtaggcgccacactgtatccacccggcgagcaaaccatgggtgttctcccaacctcagcagcaggatgcacaaacgcctccgttctgccttctccccctggggccgcaaatacatcaaggggaatccctagtagcggcatggatagtggaagacccgcctttgccgacacattctacgcagttagctacctgtattacggcgccttggggactctcaccactatgctctgcggggctctgattagttatttgaccggtcccaccaaacgatccagcctcggtcccggacttctgtggtgggacttggcaagacaaactgcttctgttgctcccaaagaagacacaactaccttggaagattcacttgtcaaaggaccagaggacatcccagcagccactaaaaagccaccaggtttcaggcccgaagcagagacacaccctctgtaccttggccacgacgtagaaaccaacctgtga

SEQ ID NO: 9 - DNA, 1854 bp, Mus musculus
atggagggagccgaagccggggcacgagccacctttggcccttgggattacggggtgtttgccaccatgttgctcgtcagtaccggaatcggtttgtgggtgggactcgctcggggcggtcagaggtccgcagatgatttctttacaggaggaaggcagctcgccgcagtgccagtagggttgtctctcgctgctagttttatgtctgcagtccaagtcctgggtgtaccagccgaagctgcccgatacggccttaaattcctttggatgtgcgtagggcaactcttgaatagtttgcttactgccctgctttttttgccaatcttttacagacttggtctgacaagtacctaccaatatttggagctgagattttctcgggcagtaaggctttgcgggactcttcagtatttggtggccactatgctctacacaggcatcgtcatctatgctcccgcattgattcttaatcaggtgaccggccttgacatctgggccagccttctctccactgggatcatttgcacactttatactacagttggcggtatgaaagctgtggtgtggactgacgtttttcaagtggtagttatgcttgtgggtttctgggtaatacttgctaggggggtaatgctgatgggagggccatggaacgtcctgagcctggcccaaaaccactcaagaattaacctgatggattttgatcccgacccaaggagccgatatacattttggaccttcgtggtcggcggttccttggtatggctttcaatgtatggggtaaaccaagctcaagtccaacgctatgtcgcttgccataccgagaggaaagctaaacttgcacttcttgtgaaccaacttggtctctttctcatagtggcaagcgctgcatgttgcggaattgttatgtttgtttattacaaagattgtgaccccttgcttactggccggatagccgcccccgatcagtatatgccccttctcgtgcttgatatattcgaggacctccccggtgttcccggactcttcctcgcatgtgcttactcaggcaccctttctaccgcctcaacctctatcaatgcaatggctgcagtcaccgtggaggacctcattaaacctcgaatgccatccctggccccaaggaaactcgtgtttatatccaagggcttgtccttcatatatggaagcacctgtctgacagtagcagcattgtcttctttgttgggcggcggggtactgcaggggtcttttacagtgatgggtgtaatctcaggcccccttttgggggcttttactctggggatgctcttgcccgcttgcaacacacctggcgtactctcaggactgactgccgggttggctgtttcactttgggttgcagtaggcgccacactgtatccacccggcgagcaaaccatgggtgttctcccaacctcagcagcaggatgcacaaacgcctccgttctgccttctccccctggggccgcaaatacatcaaggggaatccctagtagcggcatggatagtggaagacccgcctttgccgacacattctacgcagttagctacctgtattacggcgccttggggactctcaccactatgctctgcggggctctgattagttatttgaccggtcccaccaaacgatccagcctcggtcccggacttctgtggtgggacttggcaagacaaactgcttctgttgctcccaaagaagacacaactaccttggaagattcacttgtcaaaggaccagaggacatcccagcagccactaaaaagccaccaggtttcaggcccgaagcagagacacaccctctgtaccttggccacgacgtagaaaccaacctg

SEQ ID NO: 10 - protein, 618 aa, Mus musculus
MEGAEAGARATFGPWDYGVFATMLLVSTGIGLWVGLARGGQRSADDFFTGGRQLAAVPVGLSLAASFMSAVQVLGVPAEAARYGLKFLWMCVGQLLNSLLTALLFLPIFYRLGLTSTYQYLELRFSRAVRLCGTLQYLVATMLYTGIVIYAPALILNQVTGLDIWASLLSTGIICTLYTTVGGMKAVVWTDVFQVVVMLVGFWVILARGVMLMGGPWNVLSLAQNHSRINLMDFDPDPRSRYTFWTFVVGGSLVWLSMYGVNQAQVQRYVACHTERKAKLALLVNQLGLFLIVASAACCGIVMFVYYKDCDPLLTGRIAAPDQYMPLLVLDIFEDLPGVPGLFLACAYSGTLSTASTSINAMAAVTVEDLIKPRMPSLAPRKLVFISKGLSFIYGSTCLTVAALSSLLGGGVLQGSFTVMGVISGPLLGAFTLGMLLPACNTPGVLSGLTAGLAVSLWVAVGATLYPPGEQTMGVLPTSAAGCTNASVLPSPPGAANTSRGIPSSGMDSGRPAFADTFYAVSYLYYGALGTLTTMLCGALISYLTGPTKRSSLGPGLLWWDLARQTASVAPKEDTTTLEDSLVKGPEDIPAATKKPPGFRPEAETHPLYLGHDVETNL

SEQ ID NO: 11 - DNA, 2897 bp, Artificial sequence
  expression cassette
ggccagatatacgcgttgacattgattattgactagttattaatagtaatcaattacggggtcattagttcatagcccatatatggagttccgcgttacataacttacggtaaatggcccgcctggctgaccgcccaacgacccccgcccattgacgtcaataatgacgtatgttcccatagtaacgccaatagggactttccattgacgtcaatgggtggagtatttacggtaaactgcccacttggcagtacatcaagtgtatcatatgccaagtacgccccctattgacgtcaatgacggtaaatggcccgcctggcattatgcccagtacatgaccttatgggactttcctacttggcagtacatctacgtattagtcatcgctattaccatggtgatgcggttttggcagtacatcaatgggcgtggatagcggtttgactcacggggatttccaagtctccaccccattgacgtcaatgggagtttgttttggcaccaaaatcaacgggactttccaaaatgtcgtaacaactccgccccattgacgcaaatgggcggtaggcgtgtacggtgggaggtctatataagcagagctcgtttagtgaaccgtcagatcgcctggagacgccatccacgctgttttgacctccatagaagacaccgggaccgatccagcctccggactctagaggatcgaacccttgccaccatggagggagccgaagccggggcacgagccacctttggcccttgggattacggggtgtttgccaccatgttgctcgtcagtaccggaatcggtttgtgggtgggactcgctcggggcggtcagaggtccgcagatgatttctttacaggaggaaggcagctcgccgcagtgccagtagggttgtctctcgctgctagttttatgtctgcagtccaagtcctgggtgtaccagccgaagctgcccgatacggccttaaattcctttggatgtgcgtagggcaactcttgaatagtttgcttactgccctgctttttttgccaatcttttacagacttggtctgacaagtacctaccaatatttggagctgagattttctcgggcagtaaggctttgcgggactcttcagtatttggtggccactatgctctacacaggcatcgtcatctatgctcccgcattgattcttaatcaggtgaccggccttgacatctgggccagccttctctccactgggatcatttgcacactttatactacagttggcggtatgaaagctgtggtgtggactgacgtttttcaagtggtagttatgcttgtgggtttctgggtaatacttgctaggggggtaatgctgatgggagggccatggaacgtcctgagcctggcccaaaaccactcaagaattaacctgatggattttgatcccgacccaaggagccgatatacattttggaccttcgtggtcggcggttccttggtatggctttcaatgtatggggtaaaccaagctcaagtccaacgctatgtcgcttgccataccgagaggaaagctaaacttgcacttcttgtgaaccaacttggtctctttctcatagtggcaagcgctgcatgttgcggaattgttatgtttgtttattacaaagattgtgaccccttgcttactggccggatagccgcccccgatcagtatatgccccttctcgtgcttgatatattcgaggacctccccggtgttcccggactcttcctcgcatgtgcttactcaggcaccctttctaccgcctcaacctctatcaatgcaatggctgcagtcaccgtggaggacctcattaaacctcgaatgccatccctggccccaaggaaactcgtgtttatatccaagggcttgtccttcatatatggaagcacctgtctgacagtagcagcattgtcttctttgttgggcggcggggtactgcaggggtcttttacagtgatgggtgtaatctcaggcccccttttgggggcttttactctggggatgctcttgcccgcttgcaacacacctggcgtactctcaggactgactgccgggttggctgtttcactttgggttgcagtaggcgccacactgtatccacccggcgagcaaaccatgggtgttctcccaacctcagcagcaggatgcacaaacgcctccgttctgccttctccccctggggccgcaaatacatcaaggggaatccctagtagcggcatggatagtggaagacccgcctttgccgacacattctacgcagttagctacctgtattacggcgccttggggactctcaccactatgctctgcggggctctgattagttatttgaccggtcccaccaaacgatccagcctcggtcccggacttctgtggtgggacttggcaagacaaactgcttctgttgctcccaaagaagacacaactaccttggaagattcacttgtcaaaggaccagaggacatcccagcagccactaaaaagccaccaggtttcaggcccgaagcagagacacaccctctgtaccttggccacgacgtagaaaccaacctgtgaaagggttcgatccctaccggttagtaatgagtttaaacgggggaggctaactgaaacacggaaggagacaataccggaaggaacccgcgctatgacggcaataaaaagacagaataaaacgcacgggtgttgggtcgtttgttcataaacgcggggttcggtcccagggctggcactctgtcgataccccaccgagaccccattggggccaatacgcccgcgtttcttccttttccccaccccaccccccaagttcgggtgaaggcccagggctcgcagccaacgtcggggcggcaggccctgccatagcagatctgcgcagctg

SEQ ID NO: 12 - protein, 643 aa, Homo sapiens
MEAVETGERPTFGAWDYGVFALMLLVSTGIGLWVGLARGGQRSAEDFFTGGRRLAALPVGLSLSASFMSAVQVLGVPSEAYRYGLKFLWMCLGQLLNSVLTALLFMPVFYRLGLTSTYEYLEMRFSRAVRLCGTLQYIVATMLYTGIVIYAPALILNQVTGLDIWASLLSTGIICTFYTAVGGMKAVVWTDVFQVVVMLSGFWVVLARGVMLVGGPRQVLTLAQNHSRINLMDFNPDPRSRYTFWTFVVGGTLVWLSMYGVNQAQVQRYVACRTEKQAKLALLINQVGLFLIVSSAACCGIVMFVFYTDCDPLLLGRISAPDQYMPLLVLDIFEDLPGVPGLFLACAYSGTLSTASTSINAMAAVTVEDLIKPRLRSLAPRKLVIISKGLSLIYGSACLTVAALSSLLGGGVLQGSFTVMGVISGPLLGAFILGMFLPACNTPGVLAGLGAGLALSLWVALGATLYPPSEQTMRVLPSSAARCVALSVNASGLLDPALLPANDSSRAPSSGMDASRPALADSFYAISYLYYGALGTLTTVLCGALISCLTGPTKRSTLAPGLLWWDLARQTASVAPKEEVAILDDNLVKGPEELPTGNKKPPGFLPTNEDRLFFLGQKELEGAGSWTPCVGHDGGRDQQETNL

SEQ ID NO: 13 - protein, 9 aa, Homo sapiens
EADPTGHSY

SEQ ID NO: 14 - protein, 15 aa, Homo sapiens
TSCILESLFRAVITK

SEQ ID NO: 15 - protein, 12 aa, Homo sapiens
EYVIKVSARVRF

SEQ ID NO: 16 - protein, 9 aa, Homo sapiens
EVDPIGHLY

SEQ ID NO: 17 - protein, 9 aa, Homo sapiens
FLWGPRALV

SEQ ID NO: 18 - protein, 12 aa, Homo sapiens
VIFSKASSSLQL

SEQ ID NO: 19 - protein, 9 aa, Homo sapiens
SLLMWITQC

SEQ ID NO: 20 - protein, 9 aa, Homo sapiens
MPFATPMEA

SEQ ID NO: 21 - protein, 12 aa, Homo sapiens
EFYLAMPFATPM

SEQ ID NO: 22 - protein, 10 aa, Homo sapiens
EAAGIGILTV

SEQ ID NO: 23 - protein, 10 aa, Homo sapiens
EAAGIGILTV

SEQ ID NO: 24 - protein, 9 aa, Homo sapiens
ILTVILGVL

SEQ ID NO: 25 - protein, 14 aa, Homo sapiens
AAGIGILTVILGVL

SEQ ID NO: 26 - protein, 9 aa, Homo sapiens
MLLAVLYCL

SEQ ID NO: 27 - protein, 11 aa, Homo sapiens
SSDYVIPIGTY

SEQ ID NO: 28 - protein, 13 aa, Homo sapiens
SYLQDSDPDSFQD

SEQ ID NO: 29 - protein, 9 aa, Homo sapiens
KTWGQYWQV

SEQ ID NO: 30 - protein, 9 aa, Homo sapiens
LIYRRRLMK

SEQ ID NO: 31 - protein, 15 aa, Homo sapiens
GRAMLGTHTMEVTVY

SEQ ID NO: 32 - protein, 10 aa, Homo sapiens
ACDPHSGHFV

SEQ ID NO: 33 - protein, 9 aa, Homo sapiens
SYLDSGIHF

SEQ ID NO: 34 - protein, 10 aa, Homo sapiens
ILDTAGREEY

1. A recombinant herpes simplex virus (HSV) genome for use in the prevention or treatment of cancer, wherein the recombinant HSV genome comprises:
(a) a modified UL53 gene comprising a deletion corresponding to the region of the UL53 gene that encodes amino acids 31-68 of wild-type gK;
(b) a modified UL20 gene comprising a deletion corresponding to the region of the UL20 gene that encodes amino acids 4-22 of wild-type UL20 protein; and
(c) a nucleic acid construct encoding an oncolytic protein or tumor antigen;
wherein an HSV comprising the recombinant HSV genome is capable of replication in a host cell and incapable of entry into axonal compartments of neurons.

2. The recombinant HSV genome of claim 1, wherein the recombinant HSV genome is derived from the genome of HSV-1 or HSV-2.

3. The recombinant HSV genome of claim 2, wherein HSV-1 is HSV-1 strain F.

4. The recombinant HSV genome of claim 2, wherein the recombinant HSV genome is derived from the genome of VC2.

5. (canceled)

6. The recombinant HSV of claim 1, wherein the tumor antigen is an antigen specific to, or associated with, a cancer selected from the group consisting of melanoma, lung cancer, prostate cancer, pancreatic cancer, breast cancer, colorectal cancer, kidney cancer, bladder cancer, non-Hodgkin's lymphoma, thyroid cancer, endometrial cancer, ovarian cancer, leukemia, and liver cancer or wherein the oncolytic protein is a sodium iodide symporter (NIS).

7-8. (canceled)

9. The recombinant HSV genome of claim 1, wherein the tumor antigen is a peptide comprising an amino acid sequence selected from the group consisting of the amino acid sequences set forth in SEQ ID NOS: 13-34 or wherein the NIS is encoded by a nucleotide sequence selected from the group consisting of:
i. the nucleotide sequence set forth in SEQ ID NO: 8, 9, or 11;
ii. a nucleotide sequence encoding a protein comprising the amino acid sequence set forth in SEQ ID NO: 9 or 12; and
iii. a nucleotide sequence encoding a NIS protein comprising at least 80% amino acid sequence identity to at least one of SEQ ID NO: 9 and 12, wherein the NIS protein comprises MS activity when expressed in a host cell.

10-16. (canceled)

17. A herpes simplex virus (HSV) comprising the recombinant HSV genome of claim 1.

18. A composition for treating or preventing cancer comprising the HSV of claim 17.

19. The composition of claim 18, further comprising a pharmaceutically acceptable component selected from the group consisting of a carrier, an excipient, a stabilizing agent, a preservative, an immunostimulant, and an adjuvant.

20. A cancer vaccine comprising an HSV, the HSV comprising the recombinant HSV genome of claim 1.

21. The cancer vaccine of claim 20, further comprising a pharmaceutically acceptable component selected from the group consisting of a carrier, an excipient, a stabilizing agent, a preservative, an immunostimulant, and an adjuvant.

22-24. (canceled)

25. A method for treating or preventing cancer, the method comprising administering to a patient a therapeutically effective amount of a composition of claim 18 cancer vaccine comprising the recombinant HSV genome of claim 1.

26. The method for claim 25, wherein the cancer is selected from the group consisting of melanoma, lung cancer, prostate cancer, pancreatic cancer, breast cancer, colorectal cancer, kidney cancer, bladder cancer, non-Hodgkin's lymphoma, thyroid cancer, endometrial cancer, ovarian cancer, leukemia, and liver cancer.

27. The method of claim 25, wherein the patient is administered a therapeutically effective amount of a composition comprising an HSV, the HSV comprising a recombinant HSV genome which comprises a nucleic acid construct encoding a Mus musculus sodium iodide symporter or a Homo sapiens sodium iodide cotransporter.

28. The method of claim 27, wherein the nucleic acid construct comprises a nucleotide sequence selected from the group consisting of:
the nucleotide sequence set forth in SEQ ID NO: 8, 9, or 11;
a nucleotide sequence encoding a protein comprising the amino acid sequence set forth in SEQ ID NO: 9 or 12; and
a nucleotide sequence encoding a NIS protein comprising at least 80% amino acid sequence identity to at least one of SEQ ID NO: 9 and 12, wherein the NIS protein comprises NIS activity when expressed in a host cell.

29. The method of claim 27, further comprising administering to the patient a therapeutically effective amount of ¹³¹I before, at the same time as, and/or after the composition comprising the HSV is administered.

30. A method for producing a composition for treating or preventing cancer, the method comprising:
(a) transfecting a host cell with the recombinant HSV genome of claim 1;
(b) incubating the transfected host cell under conditions favorable for the formation of an HSV comprising the recombinant HSV genome;
(c) purifying the HSV comprising the recombinant HSV genome; and optionally
(d) combining the purified HSV with at least one pharmaceutically acceptable component.

31. A method for producing a cancer vaccine, the method comprising:
(a) transfecting a host cell with the recombinant HSV genome of claim 1;
(b) incubating the transfected host cell under conditions favorable for the formation of an HSV comprising the recombinant HSV genome;
(c) purifying the HSV comprising the recombinant HSV genome; and optionally
(d) combining the purified HSV with at least one pharmaceutically acceptable component.

32. A method for producing an HSV for use in preventing or treating cancer, the method comprising:
(a) transfecting a host cell with the recombinant HSV genome of claim 1; and
(b) incubating the transfected host cell under conditions favorable for the formation of an HSV virus comprising the recombinant HSV genome, whereby an HSV comprising the recombinant HSV genome is produced.

33. The method of claim 32, further comprising purifying the recombinant HSV virus produced in (b).
